United States Patent Application Publication US 2012/0107916 A1 - sequence listing, part 3

SEQ ID NO: 14 - DNA, 6000632 bp, Clostridium beijerinckii (residues 4,000,423-6,000,632 of 6,000,632)
gttcgtttcaataaatataattgctctaccaataatttgcttgtctttcaatgcagtttcctccttatttaaggcataatattataaaaatcttttcccgctttttcacaaggaagattcacaataatttcttgctcttgtagcttttctaccataaaagttttccattcatttgcttgtggcgaaccaaatgtcatttctatttttttctctgttgtattaaataccatagagcgtaaagttccaaaaaattcaggataatagtgacaacacaatccttttggataagacgtagataatatatcttttagatctttctctgatattttttctttttcacaaaacatttcttctattgctttataacgaatcaccgaattttcaatcaatatcttttcatatgcctttatttccgttaaaactgtatgatttgtggaaataagaaatttctgtttagattcattatccaaaatacgatatgatttatgaccatctatactctgtaacaatgcaattttattactattatcagcgagcattaaatttatattatatccaataggtgcatccattgcccatgcaatagcttcctcaacatttttgcaattttccaaaacacttcgaataacaacccaaaaagaaaacccagttatgccagctttctgtccccctttaaaatttccaacaggtaatccattactagctttacaagctgccaatccatattcattcatcccatcacatcgtccgaataaattaagtgtagaaccgatgtaacgatatttccctctaatagatgtatacgcaaaacacatctcttccatctcatcattaaaatcgtagttacgtgccatcaaagtgtggccattttcaatcttgtttggtactgcagacattaagctacatccacgttctaaatatgtcattgcataaaaaattgcttgttctttggaaattccaactgtatctacgaatccttcgatttcctcatttgcaccactgcaatatcgatcaagaaaagtaaatatttcttttaatttactttgtggatatgcattaggtggtaagattacccttttcaataaattaggttccgataaaatccaattcccaatctgtgttccaacctcataacttgttcctacaaaattctttaagtatgtctttgtctttttcataagaagcacctcatctttcaaaagaattataagctaagataaggcggcatacttgatattttctgcggattttttatataattttttattaaaattactatttactgttttcagagtaaaatttcaaagcttccccaataaatttagatgctccatttccatatttctcatcaatgacttttatatacgtagcatttgataaataaagttctgcagtatacccccagtaattttctccatcatctacttttaaatcttgatgctgcttttttgtctcatctgctatttcatgtacaatttcttgaacttcttttgaataatggtttttacttaaatcggatgtaagcttattatatagctcttctattttaggcagcttagtaccaggacatttttttagaacttctcctataaatttagatgcaccactgccatatttcttatcaactacttctatccaaccaggatatatcgagtagagattcgccatgtaataccaataatcatctcccctatcacttttgaaaaattcataatcttttttagctgtatttactatttctttagcaatttcttgaatctcatttgaagaagtgtttttactcaaatcagttgtaagctttttaaataattcttttaatttaggatgtttatcttctatacaatcttttttaaacttatcaaattgctcttctaaagatgatgtagtaatattattaagattattttttacagcttttgcatatctctcaatacttccatattgctttatagcagccttagcaatctcatcttccttaagcttgcatttttcaataaattcattatatttatctatgcttccatatgttttaattactttatcttcatgctctgttttaaattcttccaacacattgtagtattcactcatatcaaattctctaaaatccatagttccttctccttttaatgttttatttataaggtctattaagccattcaatctttttcgctttaaaataagcagctttttttggttttctagtgcctgcattttattaaagtatggacttgacattatatctttaatttccttcaaaggtatatcaagctctttaaaaaacaaaatctgctgtaaagttttaagagcttcatcatcataaagtctgtaacctgtttctgttatttcactaggcttcaataagcctatttcatcataataatgcagtgcgcgtacacttattcctgtcaaatctgaaacttgttttactgttctcattgctacacctcagaatttaattttagagccttaaaaattatttagtaatctgccggtaaaaagtttaagtaatatatctaatctctatttttatattacactatgacgcagtgttagggtcaatactgtaaaaaatatcgcaaattcattcttatttatgaataatgcgatatcctaatttactatttaattttcatatataataacatctataatcaaatcttctaaattaaattttatcaatcaaaataaaataattcttcaaattttttatctaacgcgacgcaaagaacaagcgctaattttgcagtaggattaaattcccctgtctcaatagagctaattgtatttcttgatacaccaaccatttctgccaattgagattgagataatttttgttctgttctgacttcctttaaattattatgcaataccagttcttccatctgttcctttttaaatgctgacaattaaaaccaccccatgccacttccaacaattgaagccataccagcaattgccccaataattcctaaaatagtacatactaaatacactttcttctctctattataataataaactgttccgctttgcccaatcattgcgatcaacaaagctaacgaaaacactctgtaatctgcaaaagctccgcctgttataagtttttgtataaaaagaattattgagaaaatagcaaatataataatcactgcaaaataagaattctgatttgctgatttttgaatatatcgctcacgctcatcatttaataagttttcttttttgcttcttgctaaaatttcatctctattcatatatattccacctttcagttccttgacaagtacacttggtatttttgttatatcatgccaagttttattgtcaatatttttaccaagttttctttgcattatatatatgccctctagattactctccatttacaaatttccaataaaaaaaacgcaaattcaaactcttgaataatgcgattttaaaattggttatttattttttttattgattcgtgatataggaaagttgtgtatctcgaactacaatatctatgctcttatcatataaacggaaataagcaataagtattctcacagtaattcttgaatttttgtttgaacttttctatttatataatttactgtgtaaaaaaagacatatcaaccgttgatatgtcttttaagaatatttagccacaacatgttacattaatttatcaatatcccctgactgaatgtatttaatatttgctttgatcttttcatatggccaatcccaccacttaattttcagcaactttaaaattatgtcatctctaaatcttttctttataacttttgcaggtatgcctccaacaatagtataaggcgagacatcattagtaactattgccctagtaccaataattgcaccatcacctattttcacgcctggcataattatagcgtcataacctatccatacatcatttccaattacaatatcgcctttattatcccaagcatctgttataaaactgacatctaaaccccattcctcataaaatattggaaatgtataagtagatattgatctcattgtatgatttccactagtcatgagaaactttgctttacacgcaattgaacaaaacttgccaattattaatttatcattgtttataggatactgatatagtagattattcttttcaaactctcttggatcattataaaaatcattatatattgtataatctccaacttttatattagcccttgtaattacatttttaagatatatagtttggtaatcattacttcttggatatattttatttgcatttggaatagtcatttttaattttctcctttatattaagttgcttttgactatcccattactacaatgcatttcttcatcaaatcactcctcgtaccataatcttcatttttatttatgattaattataacgcaatatttctttggattacttcgtccacttttggcttagtttcttcatctatagtaaattcaaaactcgaattgcttttaaaaaaagtgctaattttaaattctattgtatttgatgatgtccaatattaagataatttttaaaatgcttatagatgcattttctattttattaaatttaatcacttgtatattacacttatcctttatatattaagtatgatataactccggaaacataaactgattgtctttaagtaatattttactctaatctttgtcattaacatttatacattccatgatcttatttcctctcattttgtaatctataattgccttgcaaaatttattagttttactcaacactaaacaatacacttgattttatactatagtgttttaattaataatttaaatcaaaattctgaagtttacttgatgtttttcgagtcatattaaagataatacatagtaaaactattaattgtatttcccagtaaataactgaatacatattaaggtaatttaaaaattcaggaaaacatatagattgaataaaatcatcaaagcaaattaattgtaacgttgctcctgccaaaaattaatataaatataatattcattttacattatgctgtttaggtattctagattcacaaggtacatctatctgacactttccacagccatatctaggcttatgtttttccattgttttgtccaaaaattcagagcatgtgatatgatttttcccattttctatggatattgcattagctggacaattttttacacatttaccgcacattgaacaatattcatatatattttcgtattctctcttatcaggtgataaatataattctgtaattatgctaccaagtcttcctgatatacctttctttgttataagacctttagaaagtccgaatgttccaagtccgcatacaaaagcagcatgtctttcagaccagttgcttgtaaatttttcttcatgatttggatgattagcatttgaccagaatctttcatctaaagtaggtacgacactgttatatcctgcattaatcaattcagactttaaatgcatacacaacttatttaataaactctgaccttcaatacgtccatgaagccattcttcagaaggccatgacatgttccttctatttccttttttaaccgcttcgctaaatggtaagaaaaatgatatcacagtttttgattgtggtaaccactcttttggaagcatgaagtgttttccaattgctgatggttgtttcaataatgtaaagtactcatcatcaacagaaccaaatgccagaattggagcatcaaaaattttcattcctacaacattttctgaaatagctatttcctttgttatatagttatcttgtgaattctcaacaaagtcttctgcggtttttataaaatattgtttatccatctttcccatccccctaatttatattactaatacgctatttagttttactatgtaatctattcaaataaataacccatcatcttttcaggattttctaaaaactttcttgttatcatatagttatcagtctttttataaggagttttcgtaattccatcatcatcaataacaaatatatctgcacctgggtatgccattaatattggtgaatgagttgcaataataaattgtgatcttttctttactagttcattaataatagtaagcatagccatttgttttagaggtgataatgcagcttctggttcatccaagatatataatccatttccactaaaacgatttgtcattagtgtaatgaagctttcaccatgtgacatcttatgtaatgatgtacctccataactctttataacaggaactcccccagagctttctaaatcaagtttctctatttctgtagctacattataaaaactttccgcccttagaaagaaaccatcgcgaggcctctgcacacctttaactacagtaatatatttatataaatctgaatgtgtttctcttgatgaaaaacaaaagtttttagttcctccttctgcattaaatccactattaacagcaatagcttctaataatgttgatttcccgctaccattttcaccaacaaaaaatgttacatttcttgatatgtctaagctggttaagttattaactacaggtaactctttaatatagctgtcatctttatgaatttctttcttgagacgtatttcctttatatacatattatcatatagcactcatatatcacctcattgttcctttttccattgaaacgtatttcttatcctattaatttataagtttttttagagtaatatagtgaagaaattcttcctttttatttgaataaggatcactttcattaaactcaaattcaattgaagtcttttgctccttatcaatatatgtgacatcatatccatcaccgctacccataaaatctgaataagttttttttgcataattatcaccataagcctttaatacatctgaaaatttagactctgagcctatgcctctacttgttacaaattttgtatcatctgacttattaggatatccaactgatatccaagcaacttcattatctttatctatttggaaatatgcataatacggataattatcaaattctaaacctcttaatccatttttattaatattatcatttgtcaattttccaaatttctcttctaaagcctgtatatcaacttgttccattaagcaaactccagccaaactatcatctttcaaatttgtactttttacaaaaagatatttctctggaaataatatatatgctataccagttagaacagctattatacttgctataattaaatatttcctcttaattacatttccccctttcgggttatttcccccaattaaatttagttctttatataatctgatgcattcttatgctcagaatggtttgaatgtttagagttatatatacaacctgtttaatcccatcagcagacatatgtggtatgtatttttcaatatatccccaattacctgttttctgaattgtatctatagcttttgcatctgcttcatttgctgaaatgccactaatatttctctttatattcttttctaaattgctttacaaaatataaaatcatcattgcacctaaaatacatccaagtacaccctctccatttatttttattatgcctccacttatcaccccagatgtgtttgtataaatatcaccaagcatcaaaggattaaccacattccacaccgagtgcagaaatagtactggtaataaactccttgaagaatagtaacaataagatgaaggaaaactatatgtaaaggcagcaaatgcttggataacacataggaataatggattacctattccagttgcttttgccaaaagaaaaacagcaggaatgtgatacaatccccatactatacctacaattatagttgctttcgttttaccataatcttttgttaatctagggagtagatatcccctccatccatattcttctcccaaagctaagaataaaccaataactacagacagtattagaattataatacttttgaatgtgaattccttgtttatactgatatttccgacaccagtaagttgaactataaatgagcagacacctataaaaacaatagggtagaaaattccaaacaatactgattttaaagttgtgtctttaaataaatttgcttgatgatcatttgtaatcttattaaagataatagctaatattgcaggaatgaacatgattaaagcaaaatcatttttacctatagtaggattaataaacaacataattgtaataatccatgtaattaaaagaacagtaataatatatactttttcaggatcttttcttataaaattcttaacagtcatagttacctcttttctacaaaggataatcttaatattattgctatcaagttactgataattaaaacaaattaactatatcatttttacatttttcttttaaattcaaaatataaaatattatataaacatatatcattcaactttccagaaaacatctgcttaatttactgtatcagatttgttagataatgatttagttctatttatatattgtttcttacactgatcttttacggaaaatataagttacaaaaaagcctctatcatcttcattctctatattttcaattaactcaaaggatttctttaaattttcaaaatctgctgactgaataagatcctcttttctaattttaaaatcaatcttatgcttatgcccaaaaccacaaacaaataaaatcccattatcagttatatgattttctaagtctccaagctgctctttacttaacctgtaatgattgattaagatattatcaaatattccaatatcctttaaagaattagatatacttaagtcaacttgctttgtattaactaaataattatttcttttagcaaatatcttaagcctatcaagagctttactactaaaatcaacgcctgttacttcgaatccattttcaagtaaaaacaaagtatttctaccatctccacatgctatatcaagaacagatccttttttgaaatatgtaatattttcagttacagatttttctggatttaatggattaccacttctattagcaaatttattatcccagtattctctatttcccatatactccatcttgtttcctccaacaatacattgcgtaattatctgccatcctttattaattatagtatattctgtaagtatttagtatttaattttcaaagaaatatttctactttccataaaaaccccattctttttatatagaacctttcagtaaaattttcataatcatacggaacaaatacatattcaattcggcttatatcagcataatttcaaatttcattgctgaactctatatagatatcataatcataaactatacttaaactatgaaatatcttccagccagaaatgagttatatacataagtatagattatagttaggttatctatagtatttattaaacaaaaaatatcacaaattcattattgataacgaatttgtgatattgtgacctgtagtttatttaattttacaactattatcttttcaactgttcagcaaatgactttcctactggatcagcgtcagctaaacattctggatctcctgcaatcagtcctgccttctcatgccagaactcgctaaacattatatatagtgatttaagcctatctatatcgccaccttctgctaatgtttttgcaaggaaatcaatggcgaaatacatagtcttactttcataatatagatgtggatgcggacctggggcatctattacccatataattaagtttcctaccttttgcaaaccataatgaggggttataccaagctctttacaaaatggaatgagctgatcattaaagtctatctttgagcgacaatttataataactaagtatttagaaaggctatttctagataaaacatgagcaaaatcaacacgccctgcatctccacattccttttcataagcaagatcaataccagtatattctttaaaattagcaagtgcacttggaagaaaacgcgtaagatcaagttgtggattcgatgctattgcaacgctgccagatattttttcagcagtgaataaaccagatgttcctcctgatgagactgaataaaaaatgatatgctcattaggtatgcctaggcgttttgccaccctcataacaagctttgccgtagcgtcacgataatctcgttcttttgtcccataaaaccatccaacagaaatatcggattcaaagtacatcggatcttcaatacttaataaatgtcctttcagaaacgtagaccatgaccacttatgaaaacgtggaagtggaccttttgcaattgtcttgtcatcgcgcatggtatcgagcacaacgtaaagatagtcgtattcgcttgcctgataaaagcattcaaaatgtgcgccatcaacctctgtattgaatctgccttctggaactctatctaatttttcagaatcaatgcgcacactttcccctgtgagagctgatgcatcagcagatctatatttctcacgtctacatgcttccagcttttcagcaaaattcctctcggtaccatcactattgtactcgcaggctatattttcgagaaattctattgatggtaggatgtcgctatcatccattttcttattacgcttagcaaagtattctgaattttcttcatcttttttcataacaatcagtcctttattttctaatcttagagtttattaactttcttaattataaagtgaactataaacatattttatcagaacacttgttctaaaacaatgaatttattcaaaataaaatggctacgtcatgctcattcttaatcatgcttttacaatctagtatcctcgtaaccattgatataaatgactttaaaaatcgaaaaaatttatactagcctagatcaaaagtaaagatttatgttaaaacatgattttcatatacccatacacattattaaaaaaagaagattttcaccagattgttctaaatgaatttgcatttatattttttcttgtgatatgtgaagtatatcataagttgttccttctactgattttatcttgcttaaatcatctatgaagaaaaacacatgatatttccatttatcaggattgtaaataactatgaactcactttctttaatccttggaatatttttttctatttcatctttaaaattattaagacttccctgaggttttatttctctttctatctcaaatacatatttactatctttgattttatatgttgttgtatcaattaagggtattcctatatttactttctgccatccaaaagaagttattatattgtcataaaaaccattaaacaaaaatttatttaacccattactatctttccaaacatataaaggacaatagctattttgcaaattctgattttttcctttttctgttgttagatataatttaaactttaaatcttcaaatccatctgttttatatccgttgttttttactctatcctttattatgctcatatcataatcgctaggtaatataatcttatattgagttgctatcatttctttttatcctcccttttaattttagttccaactttatttttgattcataaatgaaattattgctcaactcgtgcctttcctttcacacttacagtttaactcccattataaaaattgtataatacttataaataatctttaatatcactaatagtgatggcaaatgtaaattaattttaacgaaaggtttctatactatggaaattaatgatctaagaatatttcagatagttgcttatgaaaaatctatatcaaaagctgctttaagacttggttatgctcaatcaaatataactatgcgaattaaattactggagaataaattaaacactactttatttataagaaacaataaaggaactgtaattacacctaatggagaaaaattgcttaagtatgcagataaaattcttgaattaattgatgaagttaatagcgagttccttactcctaaaatttcttctactattaaaataggtgctactcagactatttctgcatctgttttacctaaattattttatttattccatgagaagaatcctgaagtatctttaaccttaaaaacagaaactcagaaaaatattctagatatgattttaaagaatgaactagatggggcttttatatctgatgaaattacatcctcaaaaataaaaaaagttattacatttaaagaaaagcttgcactagtatcttctataagcattgattccattaatgctttacaatctcctataatagtaaattcagatgctgattgcccttatcgtaagctcttacaaaaatggttgagttataacaactctaaggctgctgctattattgaatttgattcactagaatctatccttaggggcatagatgaaggtcttggcatatctcttttaccaaaaagtattttgcctaaaaatcataattttttcatttatgatttaaaagatgaatttactaaattagaaattaagtttgtaatcaacaagaatttaaaaatcaatcctttacttaaaagttttattagtgtaacaaataatcatcttttaaattctcagtaattaatttttaacagtatggcttataggtcggattattttttataccattagatttatggctaattatacaattgaaataaaaacactatgaaggtatagccttcaaaccctcattatttaagcatattctgaagaatatatatggtaatattcttcagaatagatattgttcagaatatatattctgaacaatatttatggtaaaccatattagaatataatagttttataaaattctattctaaataaattcacctaccataaaatatttttgttgctttaaatatactacctataagtatttactaatttaaagaagcatacatttctgctgctgtataaaggtagtaagaaagtccagttaattgattttcaagtatgctcctatgaaaatcatcatctaaaaagaactttgtttgagctacaaatgattttgcatccaccctatgaccatgatcatttaaaaatttaatatgactttttaatgtttcctgtacgcttttatcattagcctttacaccatttttcagagcatcttttatatagttcataaactgctgtgcttccatagctgcctcattcatattattaacttgagcttcatctacctcaggcatatcatatccatacttacctttaaggtagtttttctgatttgaaagtgcatccttccattcctctttgttgaatcccttaaacattgctgacttatccataatttctcctctcttaccaaggacaattgattcatttatagtctttagcaaacgatcagtcctatgcttgcgcgcaattagcagttcctgttgtttaactaaacactctaaccgattcggctcatcctcaagtgcttttttaatatcactaagagaaaaatcaagctcacgataaaataatatttgctgaagtcgctcaagttctttttcaccataaagacggtagccggcttcatttacctcatgtggaaatagtaatcctattttatgataatgatgtagtgtttttacagtgactcctgtaaattttgcaacttctttaaccgtgtatagcataattcttcacctcgtttataataataagacctcctgtaaggtgagggtcaagattatttctaagcttttatttattaatatatatgttgcaattcacaattacggataaaattcttgcaatatttttagaattatgatgaagaattattttttcaatatatataatttttactgatacaaataatttgtgatacattttaccaatgaaatattatgaaattgttaaaaggattcttttcttccattgcatcaacactctatctcatacagatatttaaataattacaaattttctctatcctataaaccaatttgctcaatccagtttttaacctgctgttcactaaaattactcatagcttcaaaaccaggaaggattgttgatttctggcattcttttgcagtattaatttgaatttgcccaaaacctcccccaccatgagtgcaaaaaggaataatagtctttccctgcaaatccacgtttcttaaaaaacttagtattggtggagcaaatgatttaaaccaattgggagtacctaaaaaaatgtaatcataagacttgactggttcttctccagataataattttggacaatatccattttcaatttcattccttacttcctttgctgctgtattataattgaaagcataggacttttcaggaaccaactctctaatatctcctccagtttgttttgctatttcttctgctaacattcttgttgtatttgaaaaagaataaaatactactaatattttgctcatttttacctccgtaaattataaaatgtttattttctcgaatcatggtatagattttttatgtaaattaagatatttttccatttatattatcatcatcttccttagcgcctataggtaatgagatagtaaatttagtgccttctcctaacctgctacttacatctatagttccagaatgtttatttactattatatcatgtgaaatacttaaacctaatcctgttcccatacctactggttttgttgtaaaaaatggattaaaaatactatttatattttcttcagcaattcctactccattatcgcttatttcacattttacataattattttcacaataagtatgaatttttattatacctcgaattccttttgactttattgcatgagcagcatttactaatatatttagtaatacttgatttatttcaccattaattgcttttattgttggaaccacttcaagattttcttcaataactgcataatatttaatttcgttataagcaatagttatagttgattttatattgtcatttatatcatattgggtatattctaaagaagatgcctttcttgcaaatccaagaaggctttttacaatattctctattctagctattccatcttcagattctgatattatatcatccatatcttcaaatagaaaatcaattttatttctatttcggtattcaacaatctcaaagaaatttgaatcatataaatctttatgtgttatttttatatttccctcaatattcttatataactccaaaagatttttcaacttatctttatacttttctagcatatacatattacttttaacaaatcctaaaggattatttatttcatgagctattccggcagaaagctgacctattccagccattttttcttgatgaacaatttgcgcttgtagtttttctattttttctaagttctcattatactccctagaacttatttcgatgcttctttccagcagaattctatccttatcgaattcaatataagcagaatttacagcctccaaaaaagctttgtactcttctggaattttctcttctccaatatactttgataattgtctttttaataatttatgataatctctcatattttcacttctcccctatgagtgtaattgtcattgtttggttatgaaattcagtcacattatttttatttgaaggcgctatttctccattagaataaaagccagtaaatataacatcattacctaaaatacttcttactccctcaagttcttcatctataatttgatttaaaacaacacgccttcctctgcagcttaccaaaattgccaacttaatatcttcacaattaatacttgtaattgaattttctgctgctttaattgacccatttattagattattaaaatttgctctcataagctttccatagtaaccttctggtatttctcctgcgaacctaagactatttgttttttcatctatacctgctactgttctaacatagctatatttattatcacgtgatcttatatttaaaggaaatagcaatccactaactggtagtctacttgcatattcccctaaatattctttatataaatctaatgctggttttccatctaattcgtataatatattatcctttgactttgtaactgttctttctattccaaatgtatcaaatccacctactgacccaaatccaatcttaatcttttctccataaaatgcgattgttgctattaaattcttttttccataatcattcgcaactacaaaagtttctttatacccttcataatctccagctaatccccctgttaccttcactttctctggtaatccatcgacaaccccttctgctaatttactgccatttatgtttataccttcacctattaaaaatacatgagatagattttccactggaatcgcctttgctatttcaattcctttctcataacatttattaaagtcagttaattctgtaaccaaaaattttattttagtactctcaaaataaacagctgttacagttaaaatattatcatttacttggtcattaaatatctcaccagctgttgtacagcctattatatccgcattaggatatgttatttttatcttattaaacacttctttattgcagataaattctttagaaccaaataaaaatattacttgggccttcactaatttacctaacgtaataatgctatcaacctcattcagtttataaaatgcaaattgctctacaaccatcctcaaatccccctataatatctctaaataaattattttgaaatgaaactactcatcaaatagtccatttaattccgccacttccccaagcctcttttcgaatatatctttatctatcccaagttctaaaaatgctttttcatccaaatccataagactactttcttttaatatgtcccaagcatattttcctgcaatgtgaacaacatatacaatttgcttattaataacattttcatgaaatggctcatgatgatagattgctgcttcaacaataggaaatggtatatcccaccatcttaataggtaccctcctatttcttgatggtttgtcccaaaacattttttttcaagttctactatagcagtatggtgattcttaacttcatcaattatttcgctatatttatcttgaaaatgatacatcataaatgccatcccaatgttactcaataatccagcattcatttcagtttctggaattttcttattgagaaattcattataaataaaacttacaatcctattggcgataaaggattgcttccacagcattttcaatttttctttccccttagaatcaaatcctagactatctataaatgcagatgaaatgactatatttttaatattatctagcccaaggtatgcgacagctcttttaattgaacctgtcttcactccataatgagatgaatttataacatgaagtatttttattgcaatagaattatcggattctattgcttcaactatttcatatatttcagcattagattctatttcatcaataattttctgataagactctttaattgtaggtaattcgttagcactctttaccaattttaaaacattaatattttcctttaacatatcttctactttaaatatgttatctatagtctcaataaaaatattattttcccaaggttttaaaatataaacttttgctatgtttttttgcaatgaatctagtataattctttcctctgcaaaaccacttaaaattatgcgaactatgtctggaaatctatttttgactatacttaacagctcataaccagtcatatttggcattctcatatcactaacaattaaatctacttcttgattttcaagaatatttaaagcttctaaaccactctcagccacgtctatctcatagtccgtatccataaaaagtcttttaaaagcttttagtatttgaacttcatcatcaacaaaaagaatcttttttcccataaaaataccccctatcctattttaatcgtatatgtactagtaaattttattacttaccataatttattctacaaatattgatatataccttttttcttttcataatttaattgtattttttcaataattatcctaatttatcactcgttgtttatttttaattataaatttaaaaaaacgacttaattaataaagcaataaactcattagaattttttctatctaaaaatagcaccagctaatttaacaagcgcgacaaattttttatctttagtaagttattgtacaaacaaagtttacgaaaaataaataagccatttctttatgatataatagtttttctagaaaccaattacatcatttaagaaatgactcaactacaagttatatcaataaatattaaattcaaaaaaatttatatctatttaaattgaaaatgctcataattaaaatttatgatattaaaattactatctttaaattgcttttttaaattttctctcattggagctggcccacaaaagtaaacatcaacactatcttttgtattcacaactttggatatttcgtttactgataaaaatcccttttcttttgaattaaataagtgcactcttaaattattactgtttaatagttgcaattcttctttatatgctccttcagcttcattattgtatgcataaaaaagatctaccgagaattcttcccctacacctgattgagcaaagctcctaaaaggtgttattccaattcctcctgcaatccatatttgattcttgacaccagttttataattaaatttaccatgaggtcctgagacaacaaattcatctccaaccttaagtgtatttaacaactcctttgtatgatcccctaatgctttaatagtgaattgcaattctccattcttaggtgcttcacttattgtaaatggatgtgaaacaaatccattttcattatctaaaatcttcaaaaaagcgaattgtcctggtttgaattttatttcttttccaatggaatcccctgtaatctcaaaggttccattagctactatatctaattttttcaccttatatttatacttaaacgaaattttttcataaaggaacacgctataaattgcagatgttatacctatgatatttattagatttagccatatacaaaaaggttccaatgaaaagacagcataagttgcacttccataatagtgataaattccaaatgcataaggaataatcataaatttatgaattgttttccacttttcataatttaattttttagccacaagggcgattaatataagtactataaatatatacatactaaaagtcccatacatggcataaggatctttaggaatttttattccattggccctttcaatttttttccccatacttattgttatattatgaataacagccaaagctaacgcacaaatacttaaatatttatggtaaatatatgatttatctagtccaccaaataagccatctaaaattttgtgtctagttgaaatgaaattaataaatgcaaatgctaccaatgcaaatgcagctattaattgagaatatccactcattgtagatatttctcttataggttcaacaaataaccataatacccatgttattatcatactcataagtataactaactttcccgatatactcctcatacttatcatcctttcataactctctatatttatataagtttattttcgataaagcaaagttttactcttgaataagaggaataaactccaattataaatgatatatatataatataatctattgtgattattgcattattagccccaatatatctatatatacatacaatccctggaattactagaaatgtagccgaaactaatctaccagcactatcgaaaataaaggacttgtccgactttttaatatttttgatatactttgatgttattataaattcaatgaatttcaaacatacgaatccaaaataccatataggcaaaatttttatgtttattaacgctatatatgaaatcataatataaaacaaatctgcaaatacatctagttttgctcctattagcgaagttgaattagtttttcttgcaattttgccatctaataaatctgaaatacatattgataaaaataaaatgctcaaattcacatttctttccttcgcatatataaattgctcaattatattttgaacaaataatactgatagtattattcttgctattgtaattaaattaggtacatgtctgactataatcttcaaagaacccctccccgttttttattgttttaacaaatcattttaagataattaaacaaaaccttctaattttctcctatatattacaagtttacaacaaaaacacctatatttctataggtgttcttagaatttacattctaggcttaatttatataatttttctcatttagtattcactagatttttcatgcttaatcttcatgaataacatgctgcctttatttttaaatattatattgtttaggcaaatatatttttatttaaataattttcctctcatatgaaaatacaattctggagtatcttccgtaataactttaaattcatatcccttagatttataatattttattatttgtggaagagccttgcatgtattcttatgcatgtctgtacaatgcaaaagtaatattatgttttggcgattttcacttcctttgattgcttttctatataaagtatctggtgagagccttgaatttaatccatccgtattatctaaatcccaatcatatattttaaatccctcatcatgtaatctttttaaatattttttgttcaatcttttgttacttccgcatggaaatctaattatattaggtgaaattccaatagccttatttatttcatcgcggcatttaatcatttcttttataaatgcgtcttcactgctataaattttccttattttgtgggtatatgtatgaagtcctattccatttccttcataataaattctttttaccacatcttcttttccttcaatttgatttccgattagaaaaaaagttgcatttactttattttcctttaatacatccaaaacatcatttgttactttgctactaggtccgtcatcaaaagttaaataaattgtttttttcttatgctcacatattttttcatttaaagtaacatcttcattgaatactaaatcacataaatcagaattaatatttatattgtctataaatatagttagaataaaaaatatacttgccaaaaaaaataagatatgttttgatttaattctcaatttgttttcctcctttgtaacttgcctcataaatctaaagcttatttcactttattattagcttcttgaatctttttatttatagcaattttatacatatgttaattcttatataaaattatttaaatacaaagattttctgcttagaagcagctataaatcaaagctatagtatattttcgttacgctggaaaattaattttcaaatgacttaattcattctttataaaattttagggactttaaaagagaaagcattaagccatataagacaagaaatttaataattttgatacacttctctatattgaattgcttgggcgcaaaatttaacaatttatcttcttttctagtaaattgtattttctagaaaacagcggcgcatccatttgattatttttaccgcagtcatatacattcttacatacatataataaatcatctatattattatgaagtgtcataattctacgagttagctgattatttttaaacattcttttcataactattcctgataattttgaaggcattttataagcaaataattcattattataatttttcaaatttacatttctagatgcaattatttttacagtttcccttatagttagtattgtttctgataaaattttagaagaatccatcaacttttctgctgccttagttgtattttttatatcaccatattctccagcgtttgttataacagctgcatttatcgccatgtgaatccaaatccactctagcatatcaaaaggtatttcagctttaatatgacaatcagataataattttaataacttatcgtaatttttaatattagttttttctttgctttcaagcataatatgatcaaatatacagcaatttagttcatgatcacttatatttccacctgctactggataaccaagtatgtactcccatcctttaaataaattttcaatataatttttatcttcccatatcccgttgaaaattatcaaagtaccattaatgtcattctcttttaatgtttttattactccttcaatttttccagctggaacacttactaatatgaaatcataagaactgtttttatttgctatatggatcttataattatcatttttttcttcgcctttattattaaatcttccatctaataacttaacatttatattttcaggtacaaatgcttttttgctgtctcttattaaatgctctaccttgtgtccctctttttgaaaaacatatccataagttgtcccaattactccaagccctattattaaaactttcatttttacacctctaaatctccatttatcttccagttaattgtaacatactttctaaaaatcatactgttatgtttttttacaaacattctcttatttccctaaaacctcatataatcatatattcaacgttctataggtctataatttactatacaaaaaaaatcgcaaattcaattttcttgaataatgcgatattagaatcattacattacttttgatagttaatttctattttgtcaaatcataacttaaactaattaaattatatatttcctccttggaaaatgggctgtccaaagcaattgtaatccagtactttttgttcatatgacatgcaggaagaatctcttctctttctaccataaaaattcctcccaaaatacctacttatttaactttaaatttttctatatcttttaacccctgataaatctccacccttggaaagctactttgatttaatatttcatcactcttttttaggattgaattataaaagtcaattgcaatttcataaacttcttgtgaattatttttttctaattcatcaaatattaaatcttctgctttattataatttccttcgtgaacaactttgttaagaattattttaaatatatctatagaactcatttgctctatatcaattttctcattattttcttcttttttattacaaataatctttccaatggatttcccaagctccttaataagtttttcaatatccatatatcttaccttcattcttgtctaatactatagatgtccaaattattaattagacttattatgtggacatatttccatacttaccctatataaatggttaacttagctagaaatcataaatatatttgtggataaaacatttaaaaatgagttgctaaaattcttagttatagattgttccactttagcttgtcatactgaaagtttgatcatgctaaaatggtgaaatctacagcttagaatcttcatcgatatttgaaattaagctgcgctaattcgtaatctaacttctacattgggtatctatagtatcacttaaatatccttatatttattttctattttcttttttgtattctttgatacctgtcctagtaatgttaaaacaataaatccaagaatgaaaattccaccaaagaatccaccaattatagtaggggtcatcactttgattcctgcccttgtataaattataattgcaaacaataacgtagctacaactgagcatataatactataaattaaattactttttacagaaggttcattgttattgtagctccatagaccacttttcaagcaactcaaaatcatcgaaatgcccccacatgcaagtatgactgtttcaccaagtacttgctgaaaagcagctttcataaataacatttgtattacaatcactattactgatacactaaacataatgcgaaacgccatatgctcacatttatagaattcctgctgttggcgttcatcaatttttttattcattatcatcatcctcccaaaaaatatcatttaatgtttttccaagtgccttgcaaatggcgatacataattgcaatgatggattaaatttcccagcttctatcattcctattgtttgccttgttacgcctactatatctgctaactgttcttgagataagtccatcgaggctcttgctgatttcattttaagatttttcacctgcattcctccttatattattgttgtaacatatacaaatcacaatgtcaaatatatattgcattatagttagtatataatacaacaactcactagcaaactcaatattagtgaattaaaagaatattacgtttctacaatttgttattcaattttgttggttagtaacttatgaacgctctggtgaatggttcaacataaaagtggttattataaattattaggctgtacaatactaccgcatataatctaaaaaccacttacagatgtgaactttatctcaaataagaaaatattctttaaatcatactcttttttataatattgtttttaggctataattgtgacatggtaaatggattcacaaaaagtaaataaccatttgacctcgaaaattaacttcattatctactagaaatattataaacaatctttctcataatatttaataaattttctctttcttcataagtatctaaagaaatcattacttttccataaatttcttcttcaaattttatatgctcctcttgtgcttttttcccttcttccgtaagctctaatttataagatcttctatctcttttactaatagatctcattataagattacgcttttctaatctatcgatcatattagtcaatgtacttttaggaatatttaatatttctaaaatatctctaataataacttcttctttctcggaaataattctaattatggatatttcattatcactaagtccttttattctagtatatttagcttcaatatctttatagcttgattcaaataacatacgatgccataatatattaaattcatctatttgctttttacattctttatccatattgtcactccaatctattaacgattattttcttaccttagcactaattgcaaaactcttataattaatctttttaaaatcaaatggctcaaatccgcattttactaaaagggccttaatttctttttcagaatatattttatagtcaccattattagatgttttgcaatataaatttataaattgtctacaaattactggtgccgttggatcccctataattaataaaccactattctttaatactcttttcatctctaataatactttttctgggcttggataatgatgaaaggatgcattacatacaattacatcaaaagaattatcttcccaaggaatatactctgaatcaccaactttcaattcagctttgtccccaagatttttcttagctattttaatcatattttctgagatatctactccatataaaccgaacttatagttggcgctaagttttattaatacattacctgtcccacatccaacatctaatatttttttaggatttgcgcttattaccctactaacaatctcctcatacattggggctacaaactttccatcactgctttcatcgtaaacttcagctgtcctattaaaatttattttcgaattttccttaaatatgtttttattattaccttccacataaatgactcccataataatagttctatttcagtatagttctatatacgaactatacttagatactactactgccaaaagtaaaatacaaccatttttcatatattttcctgtaaatgcaaaatatattaatttatattatgattaacattgaatattccacaatttagaatcacatccaaaattattgcaatatttttataattatgataaaaattatttttttaacatatataaatacaagaatattattaattctttagttgaatctcatcacttttgcttcatattactaaatcaatgattttccttatatttagacatcaaaaaatcactagacattgcctaatgattttttgattatataaatattgcattaaattattaattaacatttttatttaacaatgcatgatatatcaaataatacagtaacaaaaagtttaatatactattttaaatattcagtaacaaaatcggtaaaaagaataccttctaaatggtcaatttcatgacaaaaacattttgctaaatctcctgtacccgttagtattatttctttaccattttcatctaatgcttgaactgtcactttttctggtcttaataatcttccaaatacatgtggattacttaaacatccttctataacttcttgacttccttcttgtttaataatctttggattgactaattttattaaaccttgtcccatgtctattacaactaaccttttaagtattcctatctgcggcgccgctaagccccctccattttctgtattatacatggtttccaccatatcatctagaatttgcctgatcttttcgtctaccacttcaacttctttacttttctttcttaaaacttcatcaccaaataatctaattttccttaatgccatttaaactacacctctacttaattgtgctcttgattttctttcactttgttcaaaaagaaacacttcctctattgcacaatgaaatatttgagaaatatcataagctagccatatagatggctcatatttttctgtttcaatagagtttattgcctgccttgatactcctacaagagctcccaattgttcctgcgttaatccaacagcttcacgaaattcttttagtttatttttcattaagaaccactcctgtcatgtttaccttacataaaagtatattccactttaaatttaatgtcaagttaacattacatgatgtatatctttaagtttcaacttttcaaatacagtattattcttcctactatctaagtggtattgtattataaatttattaagctaaattttctccatccttaaatgctcttaaagataacttatcaaacattgctaaatcaggattatgactagttccacagtaatgaatgctatcctctaacttccagcctaattcttctaacatattattagcaaatttaacgccttccgcccctatcttaggatcaggattcccttgagtaaatattgttattaactttttccctggatattttgccttataatcattcctaatcattggaaatgtacgatcaaaccaaacttttgattgtcctgtaattgtatagtaatatattggagaaccaaatacgatagcatctgcttccttaatagcatcatacattggctgcaaataatcattaactgcacaaccatcgtgagtacggcaatacatacatccttgacatccacgaattccagaatcatttaaatcaaattcaataacctcagcacctttggattttgctccttttgctacttgttctaataatcttgcagtatatccattctttcttggactacctctgaaaataactacttttgacatatcttatctctccttttaaatataaaattctctaaagtcactcaattatctattgactgactttattatattaagtaacatataaatcaacaagtacgcaaaaaatatttagctactaatatttgtataagtaatggaggttgctttcatggaaaactgttctattgaatatgctttaaaaattataaatggaaaatggaaattattaatcatttgggttatatctcaaaatggaattgttcgctttaatgaactacagcgaaaagttgatggcatatccagtcttatgctctcaaaaaacttaaaagaacttgaagaagactctcttgttattcgtcaccaatacaatgagattccaccaagagtagaatatgaattatcagaacttagtcaaaagctcatagttgctttacaacatcttggcgaatggggagaagaagttcataaacataaagaaacatctgtataattaataatcaaaagttttcttcaaccatgaataatatacttaagtaattcataactacatgcttttttaaattgcgcagaaaaaaatcgcatattcatgttttattgaacaatgcgattttctgcttattttataccatgagcttattaaattttcctaataaattttatgagggttgttaaataatctaataagataattactaaaattatatgtatctgaagtaactgatataatcatctttaccatactacctttgacatatccaccagttccttagagtttgatgtaatctcttctaaagtagccgttatctcttcagtcgctgctgcttgtgattctgctatcatgtttgtattactaatctccttaataacttcatcaatagaatttctcatttcaagaagcaattgtgatactttttttgacgattcactgctcatctgtgaaagttttctcatttcacctgcaacaactgaaaaacctcttcctgcctcacctgcccttgcagcctcaatagccgcatttaaagctagaagattagattgagaagaaacactagtaataagatttaatatcgtatccgtttcttttattttttcttctgttttttgtgttgcatttacaatactattcattgaagatgaaagtctttgagaatcagtagccacttcctcaatacttgcgcttgtctgttgcagtgaactaaaaatgttctctgctacttcttctactttaaactgtttatttaagcttttccctattgcaactccaccaataatatttccacttgaatccttaatagggtaagaaatccccttaaatgatactccaaataattcttttggcactatcacacttagtaccttacctccttttatacttttatataatggttcctcaggatttaactcttgtccaacttttataggtaagttaatggaatcaccatcacgataatatataaatttcttagtatctgctacagcaactgctatatcgtcttgtaatatttcctttaattcaggaataacctctaaaaatgcctcaagtctattttccatatatacaccctccagtaaattcaatctatgataggtatatattcgataattctttctatattccttgtttttttgcgtttattttagaaatatattattttattttttagcattatttattttaaattaataattctttttaaaaaagaccctttaattatcacatacataaatacctcaacaagtggtattttttgtttaatctatatgttgaatatttcaaccctaaatacgcataatacaaatgatatattatataaaattttacattaaaggtggttaaactaatgaaaaaatttattcctatatttttaatttttttctttatatctacttgatttaatattataggtgtatctgccgaacctaaaacatttaaacaaggtatttacacttggagcgattcaggcttaccagccaattcatctattactataaaacttggcgaatctactagtaaggctatagttatggttattgattcagaccaaactatggaagctctattaagattaaacactcgagttacccaccaggttttacctccacttacatacacttcttcaattataatatttactgatggtaatgtaatattttcataaaagttaatttaaaactgactttcccatacggtattattctagaatctcatttataagtaattgtgcgtttacacgaggacatgtggtctaagataacgcttttgattaagttttacatagtatggggaatataaatttatacttcacatttgccattattctgacataataaataactataataaaatcataaacttaataaaaactttttttcatatatatttccccaaatatataaaacaaagagtaatattcatattccccatatgtttgttactcttttttgcattccaaataactattaaattcatacatacttcttacatagcatacatacaaaaatgctatacttttattactttcatattggctattttttatttcatgttactttaaaatttcacataaatatgattatctattaccttcacatgatttaaatattgatccaactctattatttaaatcaaaataacctgtatccattaatattgttggtttaacttttagggcatttggtcttccattttccaaacaatcttcctctgcatatgttgccacaatctcaccaagaaacattgtaaaatcaaatatgggaatggtttgtatcactttacacaaataatttattgaacattcctttatcattggtgcatttcctacttcatcataaaaagactcaaaaacatttgatttatctactttgcttccagaaacagttccacaataatcagttttttcaacatcatctgatttaggaatatttacagtaaaaaatccattttctaaaactccggttgttgtataatgtgagtttttcaacgatatataaagtacatttttttgacttacaactccatatgctccaattgcagcataattaggttttccattaacagtagctcctgctaaaacactgataaatggcccaaatggaatattagctatctttttctttgtcatattcattctcctatctaattataattttgttgcaacaacgaaaattatagagtataagataacaaaaatatagactttttctttctcatgagttatcatatagattaagtattcccctaattggggatacttttttgttttaaaattttgtaataaatgcagcaataattttattaataaattaacctaaatctgacttgttaacattaaccaaaaagtgtaaaaacaagcttgctaccgctagcttatatttattttcatatgtaatagaattagtatccttcatgaaattctgaacatcttctaagctgatacctgcatacatagctaaagtatcgtatctaattccaacgtcaattatcaatacatctattattcctttgactctgtcatcttcatttatactacgtatcccttcagatagaatataaatcttatttgataataatgaaggctcgggacactttggattccacacaaattctttattgtttttaatagagtccattgcattagcataaaactcatgcaaatttctttttccatccatataatcttttagccagttataatccacatttatcattctactcaaaacttcaagttcaattttataatcttcaatcaatttttttatactttctcttgttttatcaatctgattagaatttccatttattaattccatatcttctcacctaattctgtaatatattttaatatttttttaaatacatatttataaaaattggttattcaacactctaaattaatgctaatcaattttacaataatgtccttcaattctcttataaggtattaatatatcttcagtctgaactctatttagaaaagcttttaaactctcttgattatcatcaggcgcaaaatatttttttcccatccattgtattatccaacccgtaattcctgctggaataatattagtaaactctctataacctatcccagaattattgagagtataatttaaattcaatgttttctgtaatatatttttattgtcgcaaggctcagtaatttttactctatagagctttacttgttttaaaaatgtcattgttcatttatccccttccattaattgtttatattttgctgctattaaatatattacatacccttgtaatcattcatatccctcgctactttagtattatccaatcacaatccactaaaaatattgcaaatttattcttatttattaactttacttatctactactgcatatatcatatattcgatctaattgtttttctagtgaataaatgattttgtcataatcctctgtttctacttcattaaactctaatgtaactattttgggatttgtacgatcaagaacccactctaacaattcgtagtcctcttcttccatagcctgatgtgtatccattggaaaaccattttcatcatcacctgaaccatttgtatgaatttctacaacatgatcaagtggtaaccttccaatataatcataaatatcccatccccgatattttgcagtaatcttcgcatgagttatatctaacaagaaagatacatcattttcaacaatcagtttataaattttttctggcattacataaggataaaggtcgaaggcttcacggtcatgtggtgtatcaggagaattttcaagtaataatggaactgataaactctttttaaagaactgaatttgattagacatgcgtttatatatgtcatcttctgtcatacttgttaacatgtccttagatcttatagcaagatgaagaccataatgtggtgaattacatttctttataatactatttgcagaattaaaatcaattctcgctatattattcattcctgtgttttcataatagcctaaaccatgtactaaaattggtcgcattgaacgcataattttgaagtcttctttaaaatttccatatccaaacgatttaatatagtctattcttatcgagttcttctctataagaaattttagtgcttttgaccagttacacccaatatacattttaggattccctccctattataattacattatttatttgcatatgttaatactataattaactaatgaaccattttatgtaacctaattatagcatattttataaaattctattattcaatttctaaaggatatctttatagaatcctttagaaaatttgcatctttttattcttgtttgaataacccagtcttaatctttaactataataatgtaattatcgttattgctaccaatctccatttatactcatcataatctcggataaatttaatatcattttcttatcacataaaattagtcatttctaacatatagcatagtaaaaatccaaagccctacaccgcttattataggcaaaatatatgctgctataagatttatcaaactacctgctataattagtgcaataggtaaagttatttttgctatactgattcctatactaagtactctccccctaatggcatccggaatagtttgttgcaattcataaaatatagctatatcgattagtgatattgctatgcctgttaataacattattgagcaaaaatatattacataaaggttattattatcatagattttatactgcattataacagagaggcctattgctatcatgcaaattgataatatattagtcattaattttacgattttctgatgcgagaatttattcagagcttttcttattataagagcaccaagaatcattcccattgagaaaaaaccttgtattattccaaacaaattagaactcaattttaaaatattatttactatatagggcattggtacatttattgaaagacctatgaagaaatttaacacaataaagattccaaacatattcactatatcttttttacttcttaaataggttactccatgaattatatcagtgaaaatattaattttttcttcctccctttgttcattgttgtgattaaatagaaaatccatgaataactgaagaaatgcggatatcccaaaagaaaagctattgattattatgaaaagccttatatctaataaagcgaaaatcattccaccaatcattggtccaagtatagaggatgaggattcaattattttactaatagaatttatttgaagaagctttttttctgatactagatttggttttgcagtttcaatacttatcccatatatattagaaaatacattcaatataaatgtacttaaataaatcatagataaactcaaaggatgtccaattgttagaatatatagaacaagcaatagcataccatttaaagtatctgtaattactgcaagtagtttcttattaattttatcagcaagcactccagcaaatggatttacaataacagtagataatgctcctattactagagtcatggcaaaatttagacccgaaccagtaatatttaatacatacaagctaatagcaaaattatatatagatgttccaaatacagatataaagcttgcaattgaaaataaacctatatttaataactctttattcctcgaaaaattttttagtgatagaacttttattaacattgttaatctcgctttctcttaatgataatctatttttttaattcaatttaattttaaatagtagtgttatcaccatatcaatagattaattaacaaaatttaatgataaaataaataaaagatagggttaaccctaccttttaccaaagattaaatatgaatatactttttctccatctctaaaatagctttcatattttccacctttttctatatagtttgatacattttcctcaaaaatattatagtcaagttttgaaatctgttctttaatattatttaaaataaaatttttccgatatttatcttcaattaaacagtttgctgcaaaatttttgaataaaatataggtccctattatatttgaactatcctttacatatctatcagctacattcaataaaaactcttcatgatcaaaactgtaattgcttgtacccgaaatgtctaaaagcatatcagcagatttatcttttatagggatttgctcaaaatcagaacaaataaataatatttttttcttgaaatttatactctccaatatactttttaaaaataaatgtttatttatatcattatcaacagcaatgtatattgaatcatcgggtagatttctataaacatttcttagaaaaaatccaattcctgaacctaattcaagcaaaactttatgttgcaaattttgaaaatcaatctttttgtaaatccaatccattccacgatagacattatcaagataggttgtatctgtagaatttatataatctgtgatgtaattaaaatcaaacttaaaatctgaatctatttttatattagaaactctcaatattccatcttcaattatgtattcctctccacaagagcaagtcaacttcccatttataacttggttatttgctatatttccttcacgaagctttaaatcctttttacatttaaagcatctcaaaagatcaagagctttcaaatctatacctataatagatttatctttaatttctacatttgaaagcaactctagttttgttttaagcttttgcttcattaatttaagttctcttattttattttctatctctttatctttgtttacgaaaaatgatttaaaacattcattttcctcatactttgtaagctttgccaatcttttaaacatgaaaattgatttaatttcacttaatgaaaatcccatccctttaagtaatagtatatcttccaaatcactttggcatctatcatcaaagttatattgtcctccatgtttttcaggtattatcaaagtcatatttatataatgacgtacagtatcaatagttaaattgttagctttaacgaacttaccaatcttcatatataattcctccatctataatgaacttcgataacagctcttttaatagctccacatactatccaattaattaaatttttttaaaattatcattgcctactttgaattgagaatttagctatgttctcaacttgcagattctttgttagactgcttatataatttattaataatatttttgcaaaaatggctcagccataaaatttgattattatagaataaacttttttaatcatttaataataattctgatttaaatattataacggcgtttcctgaaactttggcttctacaggctcattgtcttctatctttacctcaacttcaatgataccaggcctatttatagcctctccttgtttagctttaaatctaaataaagaattattatgcttaacaagattatggtgaacaagatatacacctaatggaccatttgcattaccagtaacaggatcttcattgatacctattgaaggtgcaaacattcttccatgtattaaaatatcactttcttttgaatcagtagtaaaaatataatatccattacatttaattacctcgcttaacttagaaagtgcattataatctggctgcaatgtatttaaggtttcaatacttttaatacctatcataactttagaatgacctgttgacactatctgaattttataatcatcaagtaaatcactttctttaattttaagtacttttaaaagttcttctttatttataccatcaataatttcacgaaactcaatttttccctgtgtcataataattttgtaatcattattttcttttattatatcaacaggcaaaattcctgctcctgtcttatgataaatccttgaagtttccagttcattttcgatagcacgtacataatgagctgcaatagtggcgtgtccacaaataggaacctcgcttgtaggtgtaaaaaaacgtacttgaacatcatactcactactatttgaagataaaataaatgctgtctcagaattgttaagctctctagcaattttctgcatctcataatcagttaatccatctgcatttgatattacccctgctggatttcctgtaaatttctcctttgtaaatgaatcaacttgatataaattatattttcttgccatgttacctccagatatactttaatttataggctaaaaccatttctttaatccatgggaattaatacctatccgtaatataattaattatagttttactttaattcacttacaagtgcgcattttaaaagtaagatttatgtttggattgaaaaaataataaaaattgcctaacttaaaaaactcttttaagagcatcactgatttcattctcaaatattccaccatgatagcatataattctttcaatatcataatccaaaaactttttaacagaattttgggcttctttcatatctagggtatattgaggtactgcaataacaagttctccgttttctacaactaaggcatctcctgttattaatgatttactttctttatgataaatggatatatgtccaggcatgtgcccaggtgtagctaggattccaattcctccacaacaatcgaaataatccctatcttttaactttatatcaacgttacaactttctatagattgaagcattttatgaaaatgatctgcttctactttctcattttctgataatgaatcatatatattttcagcttgttgtaatcttaatgattttttacttccatcaatatatggagcatcttcttctgacgctaatacttttactttaggatattttcttttaaattctgctaaagcgcccatatggtcataatcatgatgcgtaataattattttagataaattttttatattaatctttttagctaacgcagcctcttctactaaactcaaaaaatttggatatccacagtcaattaatatcatttcattctcatcttccaatataactggatgtatagcatcactttgtcctgaaaaatcgaaagatatatctaatacatttattttactcattttaagtcctcccaataaaatttcaattatagaaaataatatcatgttcaaaaacaatatagttaattcttaaatatttctgtatcatttatgcacatatatattgcagtaataaacttacatctaaaattttggtaaaccaaatgctcaataaaaaaatgtaaaaattcaatttcaaaatatacagttttccaaaatatattatcttttcaactctacccattatcaattttatattttatttagaatcttaagcttattcattatcatatacaaattcttatattcatagaattgtcattaactttcttcttatacaaaataatgatgataactggtattttttgagtttctccatatcacttctatgatactcgcaacataaaataaagaaaaatgtattttaacaaaggagaaagaaaatgagattaaatggattaacaggaagggtaataactccctcagataaagagtatccaactttgagacttgagtataatctatctattaataaatttccattagctatcgtttattgttatacaccaacagatgtatccaacgctattaaatggtgcagaaaacatcatgtaggacttcgcattcgtacagggaagcataattatgaaggctattcaacagataatggcgtaatagtaatagatacgactcctatggacaagattgaagttaatactaaaaatgatactgtaaaaattcaagctggggcaagacttggaaatatatactcagcaacttctgaaaaaggatatgcctttaatggcggaacatgccctacagttggaatttctggtttggtattaggcggtggaataggtttatcctgtagaaactttggcttagtatcggacaaccttatagaggtgcaattggttaatgccaaaggtgatctaataactgccaataatcatataaatcgtgatttattctgggcctgtcgaggagcaggtggaggaaactttggagttgtaactagctatacttttagacttcataaggtaaattatattactcttatacagcttagatggaataatatttccagggaaaaatttattaacctatggcaatgttggctaagaactgctgataaaaggattagctgttttgctggtttaagtaaaaaaggcatatatttaaatggattcttctatggacctaaatctgaagctgaaaagattttaaaagagtttttgctgctcccaggtttactagataactctttaatagaatatgtaccttttatagatgctgttaaagccattggttctttttatgggcctcctgatagatttaaagctactggaaggtttgtttattgtcatctaagtaaaacaaatatcagaaacttaattaagtatatagattgtagccctggagatgattgttttataagactttatactttaggcggtaagataaaagatttctccagtgattattcagcttattactatagagatgccagctatattataggaataacagcagattgggaagaatatgaagatggaaatgtatttaaaaactgggtatcgcaagtttttaaatatgtggaaaccataacaaatggctcttatgtaaacttcccttatgctcagcttaaatattatggctatgaatactatggtgaaaattatggaacccttagaataataaaaaagatttatgaccatgacaatgtttttagattcccacaatcaatagaaccttaacccccttaaaaaaatagtctgctgattttaattcagcagactattttctttcaagttaagctactcaggttttaaagaacactttctatagaagattaatactcttatttcaaaaagctctaaaaaatctaatctatccattctcatttgtcttttgagctaaaagcaaacatcccataattgcggaattatctccaagagctggaggtacaatatattcgtccaagttcggcatttcaacatactttttcattaattgttctacttcttttcttataagtggaaataattgacgttgcttcattactccaccacccagaacaatacgttctggacttaatattaacgtatatgtcattactgcttgtgcaagataaaaagcttctattttccatacttctttattctcttctaattcatatgcatttttcccccatcgctcttctatagcagggcctgatgcaattccttctaagcaatttgaatgataaggacatgcaccttcatatttatcattattatgcatgcgaactaaaatatgccccatttccggatgaccatatccttctaagagctgaccatttatcactgcacctcctccgattccagttcctacagttaaataaacacaactctgtaacccaaatgctgcacccttttttaactctccgagtgccgctgcatttacatctgtcgtccaaccaatttgaatattatatctatcttttataattccaacaaaattatagttcgcccaagctaatttgggtgtggttgttatatatccgtaagtttttgattttttattcacatcaatgggcccaaatgaccctatacctatagcttctaaattatatttgtcaaaaaactcaaatacagatttcattgtttcatcaggtgttgtcgttggtatgctgactctttctataatttcaagattttcattgcttactgcacaaacaaattttgttccacctgcttcaatcgcaccatatttcataataattcccccctttatatatttaaaattctaacatcaatctgattttttctaatttttttatttatcttggccaacgttgttttttatccattaatttttcaaatttattgtgtggctctgattgataccaatatgcaactgatgcaagatcatcttgtcgttcaaataatcctttgtaacatactcctatttgttgcaccgtaacttttaaatcatcttgaaaataaattggatctggtatatgccaacgatagaatcctcgcatcggtggacaatcattattatgatatggattgtgtattaaatcatcatttgctgaataatatggatatccaagaaacggcgtacaataagtattttctactgtcttgccatcaacctgtgatgcaaagctccaagaacctccgaaataatcctccattcctgttccacaaattgtaggatattctttatcgccatctatataaaatttaacttctccttctccccaccaatatctttctaatgttgtcaatgctatatatgttcctacataatgcccttttccttttatattatcaataattacatagtctttctgtaattctgttatacgctcacgtctccattgagcatgaaaataagcaatatcttctggtaattcatcatacaagcagtaatctatttgatagaaaaatgctggtatagtattatcatgttgattctctagtgtaattttagcctttttatgaaatggcatttgaaaataactattcattcctctagatggaactactactattggcattgaatttacaatacactctcttgaaaagccacagcaaaagaaatctccaaggggactttccactgaaggtgcttcttcttcatcccaatacattcttaaaactaaatctcttaaaacattacaatcggcatcagttgttttattatcaaccgtaatccatatatgagttataatccctggtccatctacttcagctaatgtcaccgtttttcctggctctatatctcttaaacaagggcttccttttcttgaaggtcctaaataacttgcagccattcctcctttacctttttctccatttggattttctgcattgatagcacgagaacgtgcattttttagcactgataaactagtaagtccatttgcaaataaataattactcatataataaactctcctctctaatcaattattcttttacaccgccagccattataccatccataatttgcttttcaaataataatacaaataatattattggtataagtattatccatcccattgtactaattagatcccaaggcatactataagttgtttctttaggtattgtagttattccaacacttaatacttctatttttcttgcaaaaaacaatggtgtaaataagtcatttaaacatgtaataaaattaattatgcttatggttgctatagctggcttcattaaaggtagtgtcacataaaacattttttgtatagctctgcatccatctacttctgctgcttcgtatattgatgtcggtatttcatttaagaaattattcaatattagaattgtgaatggtattaatgcgcttgtatataatattattaaccctaaaaaagtatccaccaaattgaatttgttcataaaatcgtataatggtcttgcagttactattcctggtattaaagctgaagatactatagctccataagctatttttaaacctctactcttatattttgaaaatgcataagctcctactaagcaaataatagtagatattattaatgcagctgtagttataaataatgtatttaaagctttttctcctagctttaactcaaaaaataactttttataattttcaaaggtaatattagttggaatatattttataggtgctgtgaataattcatttgacggtttaatggatgatataaaaatccaatatagaggtattaatataacagcagatataacaacagttaacccccattttacaacaaaaggtacagtcttattaattttgaaattcataattatcacccctatttatttattttctttatatatttaacatcaattaatgttaaaactaccattgccgcaaataaaactactgctagtgatgatgcatatcctaaatttaaatttgtaaatgcttctgtcattattctataagatagtaatgttgttgagtctcccggccctcctgatgtcattgaatatacaacatcaaaactagtgagcctccacattgtaaaaaagatacatagtgttaatactgtgttttttattcccggcaatgtaattgaaaaaaatgatttaattattcctgctccgtctattttagctgcttcataaagatctgatggtataaactgcaatgctgctaatactagtatcgcaaagaaagggacatccttccataaatcaactgaaattaccgctatccttgcagataattcattaattaaccaatcgtagtgaaaactaggtaatattcgccttactaaatcatttataaggccataagtatcattaaaagcccatcttgcagcaaggcctgcaacaaccattggcattgcccatggtattaagacaattgttcttaaaaactttctgcctctaaattttatatttaacattaatgctagtcctacacctaatacaacgtgtaatatcatagaagctattgtaaatatagcagtgaattctattgatgtagctagtttttcatcggtaaacatttctatgaagttctgagtaccaataaatttcgcttctccacctcttagtaagctcatatcaaaaaaactattcttaaaggtagtgaatattggatatattgttgtaaaacctcttagtattaatacaggtgctactagcatccaagctatccatatcttattacgtttattactcatattctcctccaatctttgataattgctataataatttgaattttctattaccataaactcctttgttaaaaaataagattatagcgtatttttataattaactcatacctaaataaactaacaactcttaattctactactatttaatttaggtataaatctttcaatatttagatctaattattttttagcatatttatttacttctacctgcgccttttggcagaactcatctagagatatttcatcagagacatatctttggaataatgatcccatagaacttataaattccatagcttgaggtgccattgggcgtccgtgtagttcagtattttgtaaataccccttaattgcactaagcccttctattttaaagtttgaatcatttattacatctgaccttgcaggcaatcttgaagtcatctcataatagtctttttctccttgtgggcttgctgcataattcaagaatttaattgcagcgtccttattctctgatgctgaatttaatacataattccagcaagctatataagcactatttttttcaaaagtaggcattggcgctaaagttattccgttttcaccatatctaccagaattaacaaaattcttcatagcacctgtatacataaatattgatgcatagtcgtcatcaaagaatttttgcatcattggatcatattgatcagccaattgagctataggagtttcgccatttttagccatatcatgcatgaatttaactgcttcttttgttttagggtttgtccaatcataatagtctccaccgaacaaatttacaaaagttccgatttcattaaatacataagttttttcccatgtaccaccatatccatacttcccatctttgctgtaggccttaacatacttttcaaaatcttctttggtttttattgcatctaaaccaagtgctttcacttttgactgatcaacccaaaaacctaatatctccatatacataggtacagaatatatattatctcctacttgtattaaatcttttatataatctttaggaaattgtgatactacatcatttttcataacagtattttgtagtggctctaagaagcccgtatttttaaatgcactgatcatttcatcattgattgttataacatctacactagaatcttttgatgaaagtatagtcgtaattttggcttgcctatcgtctgtattagttgggcaagcaatagtatcaatttttattcctgtagccttttctgctttttcaatatacttttgaaaatcttcattaaaagttgtatcaactgtcattagtgttattttttcagttttatttgctgaagtttcagaacttgatggttttgtgcttccacaccctgtaaaaaatgttactgccataactgtcgaagtcaataaacacatgattttagttaatttcataaactttcccccttaaatatataacgttttcaattaaatttcatattcattttattaaatccaatagtaaatttaaatatattatttttcttataatttataatattttttgtttttgatttttacaatttataaatattgtaatgtacatagttattatctataataacattaatggtaaaatattacacagttaaaggagaggaatacttgatgatgattatttataaattaaagtctgtaaataaatttataaaaaaatatctttctaattttcaaaataaaataatagtgtgttttatactttgtactaccattcctcttctagctattggcttaatttcttataatacatccgtaaaaatagcaagagataagataattaatagtaatctccttataaacaatcagttaaaagttgatattaataatcgtataatgcaaattgagcatgttgctgattccattcaattttatttatattctttaaataatactcctgtctttcctctatcaaattatttaaatacttttaacaatacttctaataatatagatgtattaaaaaataattttaatatattttatataaatgcttttgtagatccaagtttaattataagcaataataagctaaattttaacagtctaaaggcaattgagaaatatggggtttctgaaaacgaattgataaatttaggtatatctccaaaatgggtttttagaccaaaacaagtcttcccatatatgatttctaatactaacttaggagtggattctatattttgctataggagcgttaaatacaataaaaatgattctttattgtacgcatattttgtaagtattaaatcagatgaattttcagatatactaaaaaattctactgtagataattcaatatctaattatattattgatgatgatggagttgttgtagctcactctgataaaagtaaagtaggcagtactttagataatgaaaaactttcaattattaaacaaaatgatcttcacaatggtttatcttcatataaggattcagaaattctatcttcaaaactagtgaataagtggtatattgttactgatattcctcaaaaatatatattatataacacttttccgcttattaagttaattttcttctctatcttactgctaactcctgtattcatatttattgctatctctcttggaaaagaactgacaaaaaggcttaataaactatccacaataataaaatctgctaagcttaataataatagcatacaaattgacaatcttaatgaattgatagatcctaactccgtacattgtgacgatattgattatatagcattaatttttcaagatatgataaatacaataaatgataatttcaataccatcttagatttatcaataaaaaaagaaaaattgaattatgatttactacaaacacaaatcaatcctcattttttatataatatactggactctattcacatatgtaactccataggcaaatttgatattgccaatcaaattattatagacttatcaaagttctatcgatacgtacttcgtacctctgaaaatttaataacaattaaagaagaactagaaatttctaaattatatttatcgatggagagcatatgcaaagatggaaatatagcttggaatttttatttggatgaaggtatcgaaaattttctaattccaaaacttacacttcagccacttattgaaaattgcattaagcatggaattggacaaggtaaaaataaaatcagtatagatatatctatcgtttattatgaaaattatattttaattaccattaaagacaatggcattggtattaatactgacaagcttattgacatacaatctatcctaaaaaataatggtgtcgataataaatatctagggttaagtaatgtaaatgctaggttagcttcttcaaagatatctaaagaacatataaaaattactagtgatctagacagtggcaccaaaattcaaatgatattaaatcaaattatttaaaatatatatgtaaggagacgtatttttgagaaaagtaattatagtagatgataatcatttatctgttgaaggtatttataaaaatatagactggaaatctttaaattcagaagtagcatatatgttttatgattcacaatctgttattgatgctgttaaatctgctaatattgatttaataatatcagatatagaaatgcctataatatctggactagagatgtcaaagcaaatattaaaatttaatcctaatataaagattatacttataagcgcatttgataaatttgaatacgcaagagaggctatcagagttggggtctatgattacatagaaaaacctattgattataattatctcagcacaattattaataatgcattcgtccaattagagaaagaaaaaaggaatcgtaaaatcttaaatgaaagtcgcccattaatgataagtaagtttttttcagaattaatacatttaaacactgatgaagcaaaatacaatctttctaaatatccggattacttaaatatagatttaaattcaaaatattttttgacattaaattttaaaataacaaactctaaaacattaaaaaatgatttaggaattgaaaaatatcatatttcattaatagacttaggtgatcatattaaatctgctttttctaagtttcaattatatcatcttttaatcgaacgggacgatataattacaattattggtggaaattacccaaatggaaattacttgctgaataaagttcacgatatacttaattcattcatggaacattataaaagtgatatatttgaattaaatataggcataggaagcgttattgattctttttggaacatgaaaatttcttatgataattcatgtaaagcacttgaatataattttttctttcctcaaaaaaacatatttgatattcatgatattgttagaaaaaataatgtaaataatagtgtttatctttatgccaaagaagataagctaattcaacttatttataaaaaagatttaaactccataaaaaactggatacaagatttttatgaagaaattctaataaattgtaacaataagtatttaatatttaacaatatatattccattttaagtaatgtgctaaaactattatataacatgtctataaatactaatgatattgaaaatattatagtaaatacatacagtaacttaagtacaatttgtaacagttccgaaataattaattggctttttgatattttcaagattatttgtaatagacttgatgaatcaataaaaaatcagcatgaatatctttgtaacaacgtaattacatatattcaagataattatagtaaaaaagatttatccttaaacgaaattgctttatatgtaaatgttagtccagcatatttaagtgcattattcaaaaagcaaattggtgaaaacataagtgctattataacaaatatacgaatagaaaatgcttgcaaactcttagaaaatacaaatctatctttaaaagaaattagcgaaaaggttggttatgtaaatcaatattattttagctcctactttaaaaagaaaatgaataagaatccatctatttatcgccaaggaatataataaattttaatcaacctttttgtgttttctttttcctaaaattaacttctatttcattattaaatttaacctatgtcggatttatactaaatctaacataggcttttataaaatatatatttccataataagtttacatttaaaacgtaatataaaaaaacttactatataaaatattaaatttccattcttaaggaagtaatttctgcaatttacttattttagtctatatgatattttatatataaataagtatgtactttatggaaaatgattatcatattttgtttagaagaatgtttaaataaaaataatgattatttatgaaactgtgctatatgattttatatattaacagtatttaatttgtaggagtgtaaaaatgaaggttagtataaacattatctcttctgaattagaggaagaagttatttttaacgtacacaatgttcaagaaaaaattactgaagccatagaattactgacatcatcaaatgaggttattaaacacttacttggaagaaaagaagaaaaatattacaaagtaaacgtggatgaaattttttatatagaatcaatagatagaaaagtattcatctataccaaaactcaaacatatgaaatttccgagaaattgtatgttcttgaggaacaattatctagtatgaattttattagaatttccaaatccttgctactcaatattgataagatacactctttttatccaaagttaagcggaaatctagagacccttttaactaataatgaaaaagtaataatttcaagaagatatgttgcaaatttaaaaaacaaattgggaatgagggatagcaaatgacctttaaatatttaaacaaaatattaaaattaacctcagtagtttttacagtaataacaatatttcagcttattacaaaacaatctttagataatgaaaagatttgtgaattattagctttatcattatcattttcattaataaagatagttatcaataaatatattatttctaaggactcaatatttaacccattattatatataattgtaatttgtttaatgattgctgcgtcaaattatctttttaactggaatatgtccttattattaatgctctcaacatttattgaagttatattaatttacatatgtgtaagacttattaattatcaatatgagaaaatagacgtgaagaaaatgaatgagattttagatagaaatagaaaaaataaaaaccaacaatagatttctgtttatttttattttagttttaataccgcttagttatataaatataccgcttacgtaaatacgtattgtccttatttaatttatattgtactcttacagcatgatatgaattaagaaagaaggttatattattatgatgattattaatattatttcagaggtatttaaccaaactcctttttatgtttgggttatatttatttatcttttaaagcgtgggcttaaagctagtaaagatggtgagttatcactttctaaaatgttcattatgccatctatttttattatttggggcttagaaaagttactaacaaactttagctatataggcatttctatgattttctatagtatttgtatgtgttttggtactttaatatcatattatttatattctcgatatagaaaaatatatataaaggatggctctctatataaaactggctcatatttaccaataactattatgatgactaatttttttgctaaatatctactaaatgttgctatggctgttaatccactgctatacagtacacttttctttaatattttgtattcattattatctggcttttcagttggtttgtttatcggaggtattttacaagcatataaatcttattcaaacttaaaagcattagcttagatatatgattaacacatctaaattaaaacttcacatgtattttatcagttacatcccctactaaattgatatgctccccttatagtagacagtaaaaataaagaactgtttctataaagggagcatatcaatttctaacttagttggtttaattgttaatttaaactgtccgtgctgatacctattaccaatttcaatgaatctgttattaataattcaatatcatttatcatagaatatatttagtaacataaccagagtgctatcgtacctttgggggattctcctccttcattgtactacacaacattataaagttatttatatattctgttaaatgcttgtttttatgatatgaaacatagaacttccttgtaaagttatattcttctaaatttatttttgcgatttttctgttttttaattcatcttgtattaagtattgagataaaagtgctattcctttattatgaattacagcttcttttatagaatcaatactcttacaaatccatgtaacattaggaatgatatgcgattcatcaaaaatatcttgaagcattttttgagttctacttccaggttcacgggatattattggttctgaacttaattgcttaattctaattgtttgttcagcaaggggattttctgggtggcaaacaagcattagtttatcatctaaaaaatcaatatatgttaactcgctgcaaggagattccatttgaataatggctatatccaaatcatatgataatatcttttgttctatgtaggagctatttccaatttcaacttgaatatttacggaaggataaaggttctggaatttctctaatattgggtaaattaatttatgaccaattgtggtgcaaaccccgatgcgtactagtccttgataggaaagatttctcatttttaagttcatttgccctaaatcatataataattgttttgcatggaaaagcaattcctttccattagaagtcaaatatatttttttagataatcgctcaaataactttgtattatattcattctccagcgctgatattgactgacttatggatgatggcgatatatataatttttgagcggctttactcatactcatttgagtacaaacttctacaaatatttctaaatcacgaattgtcaattgaaatccctcattccatatagttaagtatttactaatcattatataatattattcatattttacaaagcattatagaggtgataatctaaaaacaaataaatgtctttattaaaggggatgtaaattatgcaaaaaatattgattgttgtcattgatgggtgctctccagagtattttactttagaaaatgcaccaaatatttatggtttatgtgagcaaaaaggatttataaaaaatatctatggtgcagttcctacagtaaccaacgttaatcatgcctctattctgtcagggctttggccaaatgagacacaaatggtaggaaatttcttttataatcacataacaggaaagtctggatttatacaagagaaaggatttatgaaagctactacaatattacagcacattaaaagtattggtggtaaaactgctttattgacagtaaaaggaaagattcttgaagtatatggagaagatgttgatttaggaattagtgctgaaaagcctgaccttaaccttttagagcagctaggcatttctatgccgccaaaaatacaaagtgtagaaagtagcaaatggattttagatacagcctatacgtgcatacaaaaagaatctcctgaaatagtgtactgcactactaacgactatattatgcatcattatgggcctaactctgaacaggctaaaaagcaaataaacgatattgataactgtatcaaaaaaatacacgaattagaaccaactcgccagatttatattactgctgatcatggaatgaataaaaaaactactcttgtaaattttcaaaatttatctgaacaagcaggttttcatgttgtatgcgtacctccaatgaaagatagatatattgaaaaccacgcgtatcaggaaggtgggacactttatgtatatatgaaaaatgctgatgaaatggaaaagtatcttcaatttgtatctgctcaaatatcagttgacaaaatcttaagtaagaacgaagctgctgaactttatcatctgccaataaatagtataggagactacgtcatttttgcctctgaagattatgcatttgctgaaattgaaggtatttatttaaatacgaaagacgtacgaactcacggctccctttatgaaagggaaatacctttagcagctattaatcctgttgtgccaaaagaaaagtatcaattcagtaaagatataacttcaaatattttgcaattgttatctagatagcagtgtaaacattttgcaatgattataattatgaacatcaaacggattttcttcaaaaaagggtatagagcatgaaaggtggtttaacaatgaagattcttatagtcggatattttactgaggcctcaaaatcaaatattgtaaggcattttccggaagactgggacattgtaattgtccagcccggaaaagaaatgttgcatcatattgaagattgtcaggtactcatacctgaacatattaaagtagattgcagtttgctttctatagcaaaaaaattaaagttagtacagacgggtgcaggatttgacaatgtagatatagatgcctgcacgcagtacggcatttgggctgccaatgctgcaggagtaaacgcacaagcagttgcagagcacgtaatggcgctgatattgtcttattataaaaacataccatttcttgattctttcattaagaataagatagatgaaaatgaattgcagtatacagggagtgaattaaaaggcaaaaccatcgggattataggctttggcgccgtcggtaaaaaagtagctgaattttgcagggtttttgatatgaatattctggtttatgctagaaatcccgttgtgcagtctgacagttttgtaaaaatgactgatttcgatactcttgtaggcgcatcagacatagtaagtgtgcatgtatccttaaatcagcaaaccaaacagctaatcaacaaagatgtattcaaaaaaatgaagaataccgcactttttgtcaatacagcccgcggcggaattgttaatgaaagagacttgatagatgcattgaaaaacaaggacatttcaggagcatgccttgatgtgtttgaatctgaaccacttccaattgaaagtgaactccgaaatctaagaaatgtgatacttactcctcatacagcaggcttgcctgatggtctcaaattccataaaaaaagatatgatttcttcgtgaacaatataaatcgtgtagagaatggtgaagagcctaaaagcaagctcaatcaattatagctttgttgcaataaaaataagagccctttattctactttgtatataaatgttatatacaaagtagataacacctttttatcatataaattatttcctatatatcaaaacctatttgaacttcattattctcctcttcaaaagctttcatataattaaaaacttctttcactccaaaaataatattattctgctgacaggtgtctttaataattttcattaatttttcatgattcttacttaacacttcataactattcccatattctcttatatatttttcttttaaacctttaaaatgcttatctaaattcttataataatattccctatttccatttcttaatgttaatccaataccaaatactataattcctttaactttagcttctatacaataatctaaaattcctcttatatttttctctgtatcatttatataaggtaaaataggacttaaccagactactgtaggaattttgttatccctcattatttttaaaacttcgaatcgttcttttgttgtagaaacattaggttcgataatcttgcataattcttcatcataagttgttaatgtcatctgcacaacacactttgcttttttatttatacttcttagcaagtctaagtctcttaatattctatttgatttagtttgtattgcgagtccaaatccatacttatcaattatctctaaacattttcttgtattttgaagattttcttctagatgaatatatggatcactcattgcaccggttccaatcatgcacttttttctttttttcttaagtgcatcctctaatagctgcagcacattagccttaacctcaatgtcttcaaaaatatgatccattccataacaatgacttctggcgtcacaatatatacatccatgagtacatcctctataaatgttcattccattactactagataatatacctttcgccaccacatcatgcataaaatcgtaactcccttcaaattaacactgtacaattaacaattaaaagtgattaaccttatcggattctttccaatagtttctgaaataaattaaatccttcattccaatcatctatattggattcactgtttatatgaccctttttgcccacagatactgtttcaaggccccactgtttgcctttttctatacaaaacagagatgaggaatattgatcattctcactataaattagcattccaggtagctgcaggttatcttctggcaaatgttcaaaggaatctaaaaaatccggaaattgttccttgtttggatcaggtggagccactaagaagactgctttcaagtactttcgtatcttaggcatagcttttacagtaagcaagcagccaaggctgtgtgcaaccaatactacatcaaagctatttcctcttgaaagattttctattaaatttttttcccattctttatatacaggataatcccattcctcttggattattcttttaaatccatactttttctcccaaatagtctgccaatgttctggcccagagttattaaggccaggaactatctttatattcattattaacaccccaaatctacctaactttttctaaagaattctactttgtaccaaattctaacatacatataagctgatgtaaatgcagttattaaaagcaaatataaattgaatattgtgctttcctttgtatttcagcatttatttttagtatgctcaagctacgtttttaacttgataattagattattataccttcaaaatgatccatttcatgttgaattatttgtgctgtaaatccattaaatacttgctttttcttattaaagtttctatcaagatacgtaacctctatcgtttcatatctctttgtttttctaaacccaattaaagataaacagctttcttctgtttcataaggcttttccttttttaatataactggatttatcataggtacaataagattgcctacagtaaatactaatatacgcttttttactccaatcatattagcagccaatccaacacaatgctctaagtttgctcttaatgtatctattaaatcatcaattactaccatatcatttttagttgcctcttctgatttttgtcctaaaaataatatatcttttactattggttttatcataatttatactcctttttcagttgtattttttataaaaaataatatatacttttaaaatatattatataacctaaccttatcaagtaaattggcttggccatacacattcttacaattaactataggttcttcatttaatacacatctctaactaaaaaaattataacataaaccaatgacacttttaatatcattggtttatgttttaatacttaatcatgtcctatttgttttgattctccatatataggattcactgtaacagatatacgtaggactttctaagttatatctaacattagaatatcaatcgctaattttagctagattaaaaatttatttaatgaaaattttcatcagtttattataaagtggattaatcatatagcctgtaggactatgagaataccttttccctgtatttagttgattaattttttccatttcttcacttgataattcaaagtcaaacaactgaatgttctctttgattcttttgggatttgacgatttggggataataataattcccctttgtatatgccaacgtaaaattacttgagccactgttttttcatgattacttgcaatttttttcaatactgtattttccagcaaagctttattcccttgacctaagggtgcccaagcttcatgcaaaatcttatgtttagtaagatattgatgtagctcattttgtggaaactccggatgagtctcaatctgattaatcatcggtgtgatccttgagtgtttcattaattcttcaaggtgttgtatctgaaaatttgcaactccaattactttgatcttaccttgtaaatataactcttccatagcatgccacgtttctaaataataagatgaagcaaaatgaattaggtacatatcaaggtactctacgttcagctttttacaagtttgttcaaaagctttcttagtagcttcatagccatgatccgtattccaaaccttcgaagtaataaaaaattcttcccttggtatctgacttttttcgattgctaatcctaaatctttttcattgccataaattttagcagtatcaaaatgacgatatccaattttaatagcttcacccacagcagtttcaaaatcttcccctttatttagtttatataccccaaaaccaacctgcggtattttaattccatttactgcttttatttctttatttattagattcatctcttataccctccagaacaaattattttaaaccaaatcaactaaatatcgcctttagattctgccattattctagttctctttccagcaatcacacataaattcttcaacatgagaaaataacctcttcatcagaatcaaatcgcttttagctggatttatatgatagaaattcatcgttccttgcttgactaaagttacaattttggcttcttttaatatttttaaatgatgcgaaacagctggacgtgacaaatgtgtccctttagttatttctccaacccttattccaggatatgttcctttcattaagcttaaaataattaattgccttgtctcatccccaatagcagctagcactgctctacattctttgaactcattttctagttgccttaatttatcttgttcgttcattatatatctcctttaattaaattgtaatcattagtgcttttccccatacaaacttcattcattcgcatatgttaatggtttaatcttttaatccataatagcaaggcataattgttttatcaacatcgggaaagtaaatcgagacgaatatattattttgtcattaattatagtaaaatttttaacttctaggtcttttatttctagtagcctgttgaagttatttattttattatcaactcaaaatttttctctcccaatatgacaatctattttcctatcttaaattatgtgaaaatccagggatttttaaattcgtggccttcgaacccgcattattcaagcatattctcaagaatatatattctaatattctttaccataaatattgtttagaatatttattcttcaccatatttatggtaaaaaataatatcactatttatttatagccttttttattatacgagtacataaaatcattcctatttagaaaaatcttatattacctcaaacaaattaggattcagtttcaaaaaattatttattatgtatgattagcaaatttattaaaaggctaattaagaattttaatgtaatggtgtgtaaccttcacacttattaaaaagcttatttcaaattgcatttaggaaatatatgtttaatttattacataattacaaatcattctatctaaataacatattgaaaggtgaagactgaaatgacagaaaaaatagaagaaatttcagataacattgaacttagaaatgtagatatagaaaaagactataaattaaatttaagaaaagaaactcagcattttataatccattacactgaatttgataagagatgtatagataaagtttctgatgttcttgaaaatagctataatagaattactagtactttcaatcaacaacttcaagaaaaattgattattgagattcatccagaccataatcagctccatatagctttgggatttccaaatgcacccgagtgggtaagaggaggacttggaataggtaaaattgtaatagcgtcacctttaaacccaccaccaggttcagaatttcataatgtattaaatacagctgttcacgaatttgttcatatcatagtaaataaaataaatgagaatacaccaaggtggttgaatgaaggaattgcatgttatgaagcaaaagacaataatgaaaactggataataaaaactgttaaaaatggactagcaaatgatattgttcctacatttaaagatttagatacaggcgatgattttgaaacttttttcaaatatgatggatatcaatactcatatactatagtagaatcaataatcaaattatttggctatgacaagctgtgcaatttgataaaagagcccaatagttttgtagatgttttcggaataaccgaagatgagcttcataacaaatggattgattatataaaaatgaactacgcactaaattagactattagaaatttttgaacttacttgtaataggaaatcttttaatattatgtattaaatgaggaaaataaacttcctcatttaactttctgccatactttttagcttaaaaaaaccttattatcattatttatatttgacatttttaacttgtagtcttctaatgatatatggcctccagcaaattcattttcgaatatatgaaattttgttagcctatattatcatccaagctatacatagcttatgatttatatatattctttcattaattgatctaaaccaacttctgatgttaacttttcaagattattaaatatcttctcttcgtcccaattccaccattgaagcttcagtaaaaattcaattttttcatcattaaaacgctttttaataaacttggctggattacctccataaatagtatacggctcaacatctttcactacagttgaatttgtagaaataatcgcaccatcaccaaccttgacccctggcataatagttacattttgacctatccacacatcacttccaattactgtatctcccttaaaaggcaactgttctactgttggagtgaccttttcccaaccacctccaaagatattgaagggataagttgtaactccatccattctgtggtttgctccattcatgataaacttaatcccctctgcaattgcacaaaacttgcctattataagtttatctcccaagaattcataatgatgctctatattatcataaaatttctcaggagattttttattatcactataataagtatattctccaatctcaacattagattttttaggtagattacttatataacaaaccgtctttatatttgtatttggatatagctttttcttgtctggccctgtcatagagtactcactcctttcagttcttttatttgttcatttctgacttctttagaatcaatgttatagtcaaatgaatattgatcctcggtaattatttttatcaagtttccacccgtctgtctggtaatttcaattgacaatatctacatcactataaaatttctatatatccttcagttccatttactcggattctctgcccgtcttttatcaatttggtagcattctccactcctacaactgctggtaagccatattcacgtgcgataacggctccatgagtcattagtcccccaatttcagtcactagaccttttattgatacaaataatggtgtccagctagggtctgtaaaggcggtgactaatatatctccagcttctaacacagcatcttccatgtttaagatgacacgcgctcttccttctataactccagaagaaacaggtaacccttgaattgcgccagctggaatattttctcgtttatatttaccaataataatttcaccatcagaggtcataacacgtggtggtgttagtttttcatttaatttatgttcttctttacgcttcattataatatcataatcaagtttatttgtgtgtactacttcgcgaagttcttctaaattaaggtagtaaatatcttctttttcatgaataacgccatcttgtacgagtcgttccgcttctttcattaaagcctgcttataaacaaaatagcggctaatcataccgtattttgggtattcacggtaacctataaaattcctaatcaagtcgatatttcgttttgtttctttggccttttcttcaccatcaggtaactctctcaaccgactcaataactcttgctctttatttaaagcttcctgtcgcccttgctcaaatttctttttgccagcattaggctcaaagttcttgatattgcttaaaatcatagggacaagtgtaattggtttttcgctgaatctagttctagtaatatcgatttctccactgcagcgcattccaaattttctaagataagccaagattgcatctcgtgtttcctttccaccatgaaatttaatcacttcctccaaaaagttatcatcttttgcattttgtaaaaaatcaactatttctggataagggcgtatcacatctgccacatccattaattccagacccatctccgaagtaatgttgtttggtacagattgagaaagagtatcggctgcatttttttcacctaaccacttgttcatcttttcattgatccaaagagaagcatttatagcagacataaatacagctgtactttgtgggtcaaataaaatcctctttaactcatttatatcttctagaataaaatcaattaaatctactcctgatttagtttggattttttgttttaactcctctattgatgattgactcttcttaatcagctcagaaacgattgtcggatccaattccttttgtgtctctgaacctgcagctgatttacttttaatgtcactctttttctctttatcgtttggtaagcattttatgaagtctcgctctattatggtcataattgcgtcttctgtgagaggttcgagttgtttcatattatttaataagttttttctgccatctggtgaagcgagcattggtgctacatcaacaaacaaccttccaccagccttaaaccatcggccgaaagatattaactcctttaaagacattccgagtggctttaaaggatctgtcatcatttgttgatgccccacagataaatatacatgttttccttcatcattaacttcaggaattggatataaagtagtgattggtcggctctgaacaatgtaaaatgtatcgtgagccaaacaccattctatgtcttgtggacatccaaaatgctcttcaatctttctacccatatgcgcaagtctcaaaatctgttcatctgttagcacttgactattttgcatctcaggctcaatcgccaacttttcggtaccaccatcttttaaagaatagatacctagcttcttagtagatattttcttatctactattttatcgttgcgaactctataattatcagcattcaccaatccagaaaccaacgcctctcctagcccaaagcttgcatcaatagataccacttttctattacaagtaacaggatcagcagtgaacaaaattcctgctgccttagggaataccattctttgaacaaccacagaaagatggactttattgtggttaaatccgttttgaatacgataaattactgctctctctgtaaacagcgatgccaagcactttctaatatgttttaagattgattccttcccaataatatttaaatacgtatcctgctgacctgcaaaagaagctgtcggtaaatcctctgcagttgcactagaacgtacagcatatgaatctttttcaccaaatcttaatatgaatcttgcaatctcttcgctaataacctcaggtatagttatcccttctattaccttgcgaatttcactgctaatttctcttattttttctatgtcttctactccaaaatgcgataattcatctaataaacctttaagttcttcattattttcagttatttttttatatgcttctgttgtaacacagaaaccttctggtactaaaatttcagtaattctagataattctcctagattagcgcctttacctccaaccatggaaatctttgttttatcaatctcctgaaagctaagtacatatgaattcatacacattccccttcctcttttaagttggaaccctgagtagtttaattcacttgctcgcactcttatacttctcgttaaaaaccatttaaacttttaattccttttctatatacgagtgaagcaatttctacgaagtgattctgttcctatgatacacagaataagcacatattataagcctgttatttaaaaatttcatatggtataataaagttgaggggaatagttgatttttataagaattaagagaatatattatgttaaattctttaacaccacagctgaataagttacatactctaactactttattctttagtttctttgtggttcctataatttttcttttcttttatcgttacaagcatatcattagtacatcttatgtaatgtattaccgaatctataaatatttttattccgaaaactataagaatgtcgctgaatcttctaacttataagaagtgaaaatttgaatattaaaaaactgtcatcaagtgttatctaatcaaaattaattcagaaaatgataaccccctcaacacttctgtcgagggggttaattgtcgaggtaaaacgcaacctttgaaatccactatctacatttattatatctatcagtttaagcaagatgctagaatacccgctccaagcaatcctgcatcatcacctattttagccaatttaatatttacattaatattgttaaatactcttagcttaacttcattaattaatttttctaagtaattagaattgtttaaaataactgatccgccaagtactataacttctggatctactgtagttattatattagcaattgctttagataaatttatagtccattcatttaaaacgtctaaacagtctacgtctcctccactcgctttatcaaaaatatcttttgtagaaaattcttgtccacatttctcactgcctattctagaaatacttacaccactgcattgtccttctaatcctcctgaatttaaacctgcatgtctatattcatcttcgtttattatcatgttgcatacttctccagctatattgttaaagccattgactatttgatttttataaataaatccaccacctactcctgttgatagagtaatgtaatatacactttcagcatttttagctgcacctatcctggcttcgcaatatcccgctaaatttgcatcattatttacaattacaggtaattcaaaatgttcttcaaagtatttctttatcttaaagccttcccatcctcttaaattaggaggattgattatcactccatttcttatatccaaagggcctgggcatgctacaccaatagcttcaactttatatttattccatttttcttttatcatatttattaaattatctatattgcattttgctcccttttctacaatattatctattttaaatttatcaattaaattatattcattatctaaaatggcagctcttaagttggtgcctcctatatcaattcctataaaatatttcatttttaaatcctccttatttacttatcagatactcatacattttctcttatttaacattcacatttatcatcaaatatacttttcatctaggtgatctccaataagttatacatatattgatgctccaaatatatgttgatgaactccatcagcacaaatgtgcttttgcaatgacctcaagaatttatatctatctatatctttcatatatagctctaatatctattttttcgctttatctatttctcttactgcttgaatatatttactttagatttattccttttttccatgagtaagaatatctttttctattctctcaagtctctgagtactagtatttccactcacaccactgtttattaattccaccttaataaaaataacgttcaccctctaataatgaaagtgaacgccaaaataatatggttcaactattgaataatttaagagaaagtttatccattactctataaatattttagtagtttcgctccacttctcaccagatagtaatactctaaagcctgtctcttctgaagacaattttaaatttggtgcattattcatccatgtttgtggctcgatacaaataaaatctgatgaagcttcattattccatactgtacaaaatttatagtctttaccaaactcataatataactttatatttttttctttatcctcaataatagcaccattaaaaggtgtaccttgaaaacttaaaggctgtactgtgtatgtatcgttcaccggatgttcaagcggaattactccaccatccctgtatttcttctcataatcacataaattaaccttattcccagtgggtaaatatcttgaattaactaaccacttatctcctactgataaagttaatgcataattttcttttttgctgtcagcttgaaatggaacattaaaagctgtatggaatccgactcctaaaggcattagtttttcactacaatttataaaggttattttttgttctaatccttttttagataatttataggtcatttggcattgaaactcatgtggaaaatacctaaatacatcttcattaaatgaattactccaaaaggatacttcaatttcgacatactcttcaatcttattaaccttagtgctagttactgtaaaaggcaatttatttattattccatggtaatgattatttcttatagtgtcgtttattggaagttcatatgccatatcattaactgaatattttccatcttcaattcttcctggtggaaataaaattggaattccaaatattattggcttactcttaaattcctttaatgtttctggagttcttatgatattgcaacctagtactttatgctttaattcaataatattagctccgattttaggtatcatgactgcttcataatctccagcagtgaaatatactgcttcttctccagaccacgttatcttttctattttcactcccatacctcctaccataaaatatttctgtgttattataattacttatatacaacagtaatcattttttcatcattttccataaacttagtttctacatctattatagaaagaagttgttcctttgtttgcatgcctgttaaatcaagcatcttctctttatagaataggaatacctttggtatagtagcattagcatcagaatatattgtgtgttgatcaagaaaagctacaaaatctgataaagttgcatcttttctaaacgttaagttatatgcattttctttctttaaacgaacgacgccttctctatcaaccatacaaatattgtttaatgtttttttgaacagtccaaaaaaagctttcttttgagtaacagccttaaataaataccatcttcctgtattggatactaattcaactgttgatttttcaacactaagtgcacctgatactacttccttcatatcatcttctgatgcaacactttgagcaaggtcttttgatctaagttcagttgatcctgttgcaattgctctaagtatatttttttgcgaatctatttcgatagttacatcaacagtagcttcatttgctccagactgtactattttttcaattatatcttctctaattttcttaatatcatcttctgaaggagcaactaccgatctttctatctgctcacgaaccatagcaagcgcaacaccaattgtggatatgtaaggtgcattttctgctacctttgatttaaatccacctttatcagcaagtgcgtgaacaagcacagctccacttccgccaccacctacaagtgtaatgaattttctatctaattcatattcttcaaccatttcgttaacgactttcattactttatttaccgctatatccataacttgcttagctgcttcctcagcagaaatatttaagtaatctcctaaaacctgccatgcttttttattactttccgcattacctctagcataatccccctctggtacataacctaaaagatttgaagcacctgcaagtgtataagaaaattcctttccatttgagcactcaataattgcataattctttggatcgctttcccttggacttatgaatttgattttaggttcttggatattctcaggatctgcaaaacattcataatccactccagctatatgtgcacttcttggtcctacatcactaattttattattttctatttttatcatactaccgcctgctactgctaaagtacgaacatcaagtgatcttaaataagttttatgtccaccaacctgtgcattttttatcattacctttccatctttaataacagaaatatctacacttgtacctccaacttcaaagaatattccatctgaaattttttcatacataagagccccagcaactcccgctgcaagaccagatagcattgtaagtataggacgttttctcacttcatcaacgctcattactccaccatcacatctcattatcattaattgagattttatttgtgcattctttactgccttttcggtcatatttgctgtttccatcatcttagggattaagctcgcatttactactgctgttcgtgttctcgttttcaaaccatatagctgtgatatttcatgtcctcctgttgcatatagtgacttattattagctatctctattacatcctgctcatttttaggattgtcaacactatacgcttctgatgcaactataacttctgcaccttgactttgaagttcattaattgatttctctacaattttgctatttaaattcttagaatctatgaaagtatgatatgtttttaaatattttttaggagccaattctatatctgctgtatttgtctcattttttgcacttccagcatccatacctgttcccatacctattataccaacttgtgctacatccccttcaagcaaagcattagttgcttgtgttgttccatgagcaatgaacaccacatcatcaggggatatattattgtcagtcaatactttatttattattttgactataccacctgcaactccctctgcttcactatgtgttgtacttattttttgttttgcaataatttcatatgtatcattatctattactactgcatcggtaaaagttccacctacatcgataccaattctaaccttcttagccatacaatctcctccttaacctcctggttttatcacaaattaattaaatatccttatttaaaggatatcatttacgcgaatcattgtaaatagtttttgaaattttttttcattttttccggatattttggatgcgaaggttcaaaattatcccttcatttaaaatatacaagatttatgatttgttttccgaaatttattataatgattttcattaaataatataggtaagattaatagacttaatatagataagacttataaacagttaaaaaaaagactggagttgaacttaaatcctataccagtcttgtctttagccttgcatcttaaagattataatagtaattactgtaatcttgttcactttcaaataatgcatcgctatccaatttcttttgcaaatacttcttgttagatttaataagcattcctactataacatcaatagtaaacagaaaagtcatattatctgaaataaccgtgttattttcaatagctaacttatctgaagtaattatcttaatatctgtaagttcactaagttttggagaatcataacttgtaattgtcacaatcttagcattattttgtcgcccactaatcaaaggttcttgaatatctcttactgatatattacgtgttatacctataattaaatcatcttgagaagaattagcactacagagcttcatactatacacatcattataagattcagcttttattcccatcatatttagtctttgtttaagttcaatagccgactgccatgaaccaaatacactaaatatgttaactttcttagcagatttaatcatttcaactactttaattaaatccatttcatttattaaagaacatgtattgagtatcaattcattataatctgaagctatggagtcaataagactattgttatctctactcttatcatttgccttaagatttctataaaaattatcttgagctaaagctattttaaaatcattaaatcccttgaatcctatttttttacaaaatctatttatactagtttcagatacttttgtttcaattgctatattagtaattgtattattgataacaaattctgcattgtttatgacaaaattcgctatttcattttcactaaaagtcaaatttttttgtcttgaaattatctttgcaataactgctggaacagtatttctcattaaaaagccctccctgattatccgtatattttaacttgaataatatacagaatttaatcattcctaaaacaatactatcatatattatatcaaattgtaacagtctgttcaaataatacgaattttacaaagtactgtattatagggggttaagctttattagtagttataacatgttattcaattctttctctaaacaaattactattttcttaaaatcatctaaagatattttacccaattctattaaatataaataatcatatatattatgaagaaattttgctcctaatatttccttactaaaactatgcgcagcgatttcagaacactttataattgaagatttccttttaaaaaaaacaaaattcattaatgttacttgctctaaaagttcatttgttggttttttttctttgtattcaagaaaatgataaaattcatgagctagatgcatattaaatacatcctcgtaacttaacttttctttaaaaaaatccaccttattgcatgtattcataagatcaattaaagagttttcatatatttttataatattttctttcttcgaaaaacttatttctgccctaaatttcactccataaaatgttcctgatttttttactatttcaattttaacaccattatcttcgcatagttttttcagatctttccccaaatatttttttgcttcaatttttcctaaaaataatgaatcgtcaacataatactttattttatctttaggtatcttttgaaatagtaaatcattttttaattcagcataagctaatgttctatcatttaattttcctaagacatcaaacaattcttccatattctcttccccttgttataatatattgaatggaaccaccttaagtattccattcaatatatattattacaatgttactacaaaacttgcaacaaccatagaaactcctactgctacaaccagccaaataatagttttctttaagatttcgtttacatcagtctttgtataatcagaaacccatacattatgagagttcgttggatcacaaactgcttgaagattactgtttacacgtaatgcaaccattgcagctactggattcattcctgctgctacaagtaacgctgctattccacttcctaatccatatatattaaaaggtcctctatatatagctaatggtgatagtaatgtaaatacaagtatatatgttaatggactatgaggaattatagtttcaatcattggcttaagtatcgctgcaactggttctgccataacggcatttaataccattcctataccaattaataaagctaaagctcctgctgtgtcttgaataccttcaattaaggcacttgataaaacatgtactggtctctttggtgttgcaagtatcaatgttattacaatacctaaaacaactgaaggaactattgataattttaatgtaaaggcaaatattactggaataattgggctaataagtgctattgatctaacattcatattatttcccaattgcccttcattatttaatggcattgaccaagccttttttaattttgcacctttgctgttataataaagaatagtaactacggctacaattataagtggtactgcaggtattaaagaatagtttgctatttgttctgtagttaattttaatacatctttgtatattgcccaaccaccaacatagaaagttactcctattgcattagcaaacaaaagcactaatgcacttacaagtggacttaatcctgctgtcagcattattggtataatgattgttcccacaagaattaccattcctaaaccacttgctgctgagaatattattgatgctgcgattaaaaaagtaagtgcaataataactggtttatcacctgcaagttctgcagcttttcttataatagtttttgttataccaaccttatttaatatttgcccaaaccatgcaccaaatattaagccagcaatagctgaagacattctcattgaaccagcctctaatacattggctgtaattgtaaattctttaggatcacttgacattattggaattcctgcaattaatgcaaatatgactgccattagtggcaataccaaaatcgtcggtaactttcttgtcatcattaaaataactgaaactaagaatacaactaaaataccgattgcttgtatactcattctaaaacctccaaatataaaaatttattttttaattagtagttaactttttataataattttaaacatctaaatatgaaccattttcaactaatctttcttgtacttccttagcatcaacattttgtactgaaatcatcttctttgctgctattgctgctgcagtacctccagcttgtcctatagcacctactgtaggcgttactcttattgctgcttgtgcttcaaaagttgcagaaacacatcttccaacaacaataagattatctatattttccggaactaaaattctaagtggaatgttgtagtaatctccccattcaagcattttactcgcggtgccctctccatcaggactatgtatatcaataggatatcctgaatgagctattgtatcttcaaacttttctttattaagtaggtcttcagcagttaaagtatacaaacctttaatttgtcttgaacctcttacacctatagatggaccactttgtatgaaagtagcattttcgaatccagtaaggtacttcttaaagaaggcttccaattccttgcactgttttcttccctctatttcagctttgcttaggctccatggatcagtactatcacaccctaatatccttgtagtgttaactataatctctcctggattattagtttcaaagaaaagtacatcttccctttttattgatatctcacctttttcttttgcttcgttaaattccttaacaaatcctattactgataatcttggcaccttgtctatagtagtaacatctttatgaattctggcaaaattctcaggatctttttttataaattcctttaatttttccatattcacatctctaattttcatattcaaagtcattggctgagctgctccatccttttctcttcctttagtaaaaggaatacctgcaaatgctccaagatcaccgtcccctgtcgcatcaatgaatattttagctttaatatcacttaccccagccttattacatatctttatactttctatactcccattactcatttgagcaccagcaagcatagtatgatataaaacttctccaccactttctaataacattgtttcaatttcgtatttcattgcttcagcatcaaatggcgttacggaatacgtatacatgctagagtctaaaatatgacctggagatttacctgactcttttaatctttctattaattcatctgtgattccacgaataacttgcttatcaccagcatggaatgtcatcatcgggccaacgcctgcacctgttagcgttccaccaaggaaaccgttgctttcaattaccaatgttttagcaccttctcgtgaagctgctatagcagctattgaaccagaaaagccgcctccagctataacaacatcataatttttcataaaactcctcctcttgattatatttaagcattgaggtatttaatttaaaatatctcactaaccttaatattactttaccacattttttcacaatcgtaaacagtttttgaatatttttttcatttttttcatttattatgtttatttttttcgcaaatgcatagctatgcaaaatttaatgattttttcactatttaagaaccctcactaaccttggttatttggtaggtatctagcaattctacttctttaacttttgatccactttcataattaaatatagattttagagctacttgtccaaataaattttgcctttgagaaattaaaacgtccactattcctgctttaacggcttttatattgtaatccgtattatcaaatcctataagttttttatccattgaattagatgatttctttaaaagctcagcaacctttataaagtgtagatccaatccagctataactttaacatcagaatacttatttaaagcatcttttagataactaaatctttcatttatatcacaatgatttatttcaacatcaactattctaatatctgaatgagcatgcaagtactcttcaattgcttttattcttatgtcagctatttcactttttctaatagtactaagtattacatttccctttcccttagctacctttattattgcttgcgctacactaacacctgctttataattatctgtcccaatgtaggctaatctattacttccaggtaagtcaccatctacgcaaatagtttttattcctcttttacttaacgcattaactatcggactaataagcttcgcttcccatggatgtattatcagataatcaataccaccatctttttctgtcaattcattgattatagatacctgttcttctggtttacttttcaaatggttttgtggatacctaaccacaagcttatatccatattttttagcggtttctttagctatcttaatcatatttatcatatatggatcactttccggtaatattgtcacaaagccaatccttttttctctattcttatcacattcaacattgtagtgagctatttgactttctacactatctatcctactttttaactttttagcaatatccgataaaataatcatcgaattcttttgatgcatgcttacctcaacagcttctcctgttgaggctgcagtttcctctgaaatagctgcgatattagtaatatcatcaattattgaattttttaactgctctaacttatccatactatcttttactgcagaatactgattagtacattcgataatacaatgatctatattattaaaagcactattaacatccttcacagattcaagctgcaaattcaacttatcttctgtggaattaattattgtttcagttgaatcaatttccatatttatttcacttacaatattttttatctcataagctgatttaaagcttctatctgctaactttctaacttcagttgcaacaactgtaaaacctttcccctctttgccagcccttgctgcttcaatagatgcatttaacgctaacaaattagtctgatctgctatttctgtaattactgaaactatttgattaatattattagattttaattttagcattcctatactattagagacattggtaaaagcatctctagtttcagaacttttagttaaagtatcatttacatttgtactaccatgcaaacttgcgttttctaatagctgaattctattctctataactttcattgcattgttgacatcttcaaatttaagtgataatccttctactaaattcatacagctttctgtttcacctgcttgttgctgagatccctcagcaactaagtcgttaaggctcattaaagtttttgataactcttcggtctcatctgcagtatctattactgaatcacccaaagctgatatttcagcaacataacttttaaaaacctttacaagtttaataaattcatcaataataaatctttcatctgaacttaaatctttattttcatcatatttcaaattaccagttttaattttttcaattgcaacatttctacctatagatttattttctttaaatttgcaaaattgtactataattaaaaagattgctcctaaaactccaataatacataagactgattcccaatatgggaataacttacttgaaatagataccagaacaaatagtattaacattagcagcatagtagttaaatctttctttatatcaatcatttcttttcccccgttcattattattttaaaatggtatctctaattgtaagatagcatatttttttaccaatgtaaacattatctgaaagttattttctttttattcggattttttgccatattttttcttaatataacaaaacttttttattactcagatatgcatattctttaatatcattagaatttatatttttcactattttcttaagactttatttgtatgaattcatcatgtggtaacctttaggaaatatcttatctttgtgaattcacgtcgaattaaaataacccactaaaatctaaattctagattttagtgggtttcatgatagatgcaaatcatactaactctgttaatactcttaatttttactacttaaattactttttgctattattgaaccattcaatcgttgctttttcaacctctttaggaagctttttattatatacttcatcgtataaccatgccaatgatttttttcttaaatattttctcatttcatcttctgcttctgacattataaattttattaaacatgtacattttgtatgtgtacatggcaaattatctttatctactaatatattattttgcgtaatttatgcacattgaaggaatgattcgcttccttctactgcttcaacaatatcccaaaatgttatttcttctgcactgcgagctaacgcataaacaccttttacaccaggtatgattttataattcttgactcgcttaatttggtatatgccttttataaatacgtttctgagataccttaaaatgttgccaaatatcttattcccactgatttatcttcctctagttttatcatatataataagcaatgtattgcatattatactcctactaaaaatttcatatggtataataaagtttagggaatagtttatttttataaattaaaacatttcactcctagagatcgctactctttactgccatgtgatttctaaaggatttctatctaccagtcttttaaatttataaagtggataacctactaatagtgcacctgttactaccctatctttagaaatattcagcaatcttaaaagtggttcatattctgccatagaacaatattcaaatagtcctgaccagcaggttcctaatcctaatgtttgtgcatataattgcacatatgttaatgaaaagtgtgtattgtcgcgaccaagttctttttgttctcttggagctgttgcaatcactaaacatggagcatctcttaatatagtatctttgttatcattacgatactgtgctattgtcgaaacagtattctgtacccacggcgaattctttaacacaccattttctatagattcctccgtccagtcagctataatcgaagtaatttcatgtagaatcttatgattatcaataacatgatacgaaagtccttgagaattgcaagctgttggtgcaaatctagctatattaagaagttcactaattatatctcgagatacatcccttttctgaaatgctcgaatagatcttcttgatctaagaaaagtggccgcaatatctgaatccattaacttttctttttgaatttgcacttgattatctaatggagtttttgtgctgtctaaagcaccattgggacaaacagccacgcaatgaccacattcaatacaaagatccctgtctactttgggtcctaaatcactcatcaccaatgttcctctacatattttcacacacagaccacatttagtgcatttttcagaattaactttaataaaattattcatacaattctctccttcatcgtattgtcttacttaatttatatatttttaggaaacaatatttctaacctagccaccattccttttaacatagtgaaataaaaatctaataatagaatatctggaagtccagttttatcaaaattaccactattttagctgtaacaaccgttatgtaatactatttctctaatgattatttcatataatcgatctttctaactataacaagcataacctgaccacatcatgtcaagttataatcgctgaatcaaaatgaatataatccactgtataactgagaaaataaaatcacataatattacataatgttatcagactagaattcctatttacctaatttccaaaagatgaaagtattaaattatatgatattacctatctccttataatgattttgcttaagtaaataaataccattccaaaacttgacgtgatgtcgtcaagtttacttaattatactgattaagtagataaacttatttaaagggaggtatttttaattatgcaaaatactttatcatttgatattaacaaagaacttgatggtaaacgcgtacttgtaacaggtggaactaaaggtattggtagatcaattgttgatcgtttgcttaatgcgggtgcaaaaataataacaactgcacgaactatgcctaatgatttgccagattctatagggttcattcaagcaaatgttagcacaccagagggtactgagagaatcattaaagagactcttgaaagactcggtggattagatattttaataaataatgtaggtggttcttcatcctccacttctggagcattaagtttaagtgatgacgattggttgcaagcctttaaccaaaatcttttttcagctgtacgcttagatcgtggttttctgccctctatgattaaacaacagaaaggcgtaataattcacatatcatctattcaaaggagacttcctgggataatgactatgtcatactctgctgctaaagcggccctaacaaattacagcaaaaatctagctacgcagtttggtggagatggaatacgaataaatacagttgctccaggttttacagaaacaaaagctgctgagcgtcttattgaaagaatggcacaaaattccggaattgactataatagcgctcgtcaagaattaatggataaccttggcggcataccacttggtcgtccagcaaaacctgaagaaatcgctgaacttgttgcatttcttgtatcagacagagcatcttatatcactggtagtgagcatattattgatggcggaataataaggactatatagtctataaaggcgctatactaaataattcaacatagacatattgtattatttagtaatcactagattagtatcaataactttgtagtccttgctactcgtaatagcttatatatcatgaataaaattgttttctaaatcaatggtcatgaaatcgcacaaactacattaaatattttaggaggtaaaataatatggttataaacaatttattattaaaattaaagaatagagatgctgataatattaaaaaaactcaagaagttcttctaagcatgagaggaaaaatagaagttctgatagacatacaggcagaaataaatattcgtcctggtgaaagtaattatgatataattttgattacaaaatttgcatcattagaagatttagataaatatcttattcatccaaatcacttagaagttgctaaatttatcggcagtgtcttagatacacaagcatccgtatgttatagcttataaatagtaacacaactacctacatttaaaaataatagttagtacatttaatactaaaataagaaatttataccttcctaattatcttgaaaaaagttaatgtaggaaggtttattaaagttagaaattaattactaacatatcttcattattaactttatagaaaatatgaatatatatgttgcaataataaatttacatttaaaatttcagttaggtaaggcctaagtgaaaaccaaaatgtagaaatccaattacaacatatatagtattatagatcagttaaatttaaaagtatggttatagttttttgcttcaccatataacctttaaatgagagtagtattaaatccattatattcttaatttttactacttaaatcactttttgctattattaaaccattcaattgttgctttttcaaactcttttggaagctttttattatatacttcattgtataaccaagccaacgatttttttcttaagtattttctcatctcatcttctgcttctgacattacaacttttattaaacatggacattttgcatgtgtatctggcaaattatctttatctaataatatattattttgcctaatttctgcacattgaaagaatgattcgcttccttctactgcttcaacaatatcccaaaatgttatttcttccgcactacgagctaacgcataaccacctttcacaccaggtatagattttataattcctgctttgcttaattttgcatatactttagataagtaagtttctgaaataccttgaaaggttgccaagtctcttattcctactgatttaccttcctctagttttaccatatataataagcaatgtatcgcatattctactcctactgaaaatttcattttttatactcctttggtttatagtcttttattaataatatcctattatttatccccattcaagataatcatatggtatgaagcatatgttccctgccaaatatttatattgacaaacaaaagaaataataatattataatcatagataacatttatcgacgataatatatatctttattttaaaaagaaagaaggaatataggatgtttacagaaaaattttatgaggtattaaatcatgagggagtagtttctattgtaacttgttcaaataacgaagctcatgtcgctaatacatggaacagttacttaatcattgcagaaggaaataaaatcttaatccctgcagctgccatgattaaaacagaagaaaatgttaatgctaatcctaaagttaaattaactcttggtagtaaagaagtgatgggatacaattatatgggaaccggatttttaattgaaggaactgctaaattcttaaaagatggagataattttaatctaatgaaagaaaagtgtccattcttaacaagaacattagaaattacagttacatcttgtaagcaaacattatagttttctaaatgtaaggagaaaattatgcctagaataatcagtaaatctgactgtgtgggttgtgcaaattgcgagcgagtatgcattgttggatgtatcacagaagataatgataaaaaaagaataatcactgaatctgcttgtgttgactgtggagcttgccaattagcttgccctagaaaatgtatttctcaaaaataattttatttcataaaaatagaacaatcaaaagctttgtataatctaaaaaaatactatataaaacaaggttgggcttaaaatttaagcttccaaccttgatttttatattcataataagcgcacaaactttgctaggtatataactttatgtgcttaaaatacattgactagtataacgtagattctccatcttcagagtattatttgaaagcacccttatattgttctggataatcaaaatctatgtttctagattttgcttcatttaacacaaagtatgggtttcttaaaagctctctgccaactgcaactaaatctgccctgccattcgatattatttcctcagccatattaatatctgtaattaatccaacagctattgtaggaatgttacacttttctttgattatgcttgaataatttacttgatatcctggatatgcatttatttctactggaattaatcctccagtacttaaatgcactatatcaatatattctttaatttcatttataatttcaatcatatcatttagcgttattccaccctctttataatcataggctgatactctaagcaaaattgccttctcttttggccatacttctttcacagcttccaatatttcttttagaaatctgattctgttttttatatcaccaccatattcatcttttcttaaatttgataatggtgatagaaattgatgtattagataaccatgtgctccatgtatttctatagcatcaaatcccgctttatctgctcttttcgctgcttctttaaaatttaatacaatttctttaatatcatctctagttaattccttaggcaatgtgcttctttcatcaaatttaactgcacttggagctacagcttgactagctgttcctgtatattttcttccaccatgatttaattgtattgcaattttagaaccatattttttaacaccattaacaatttttttcaggccatctatatgcttgtcatcccaaattcctaaatcattatctgttgtccttccattttcaacaactcctgtagactcaagtattatgagacctactgcaccaatagctctggtaacataatgagtgtagtgaaaatcatttgccatacccgtctcgtccgaagagtacatgcacattggtggcataacaattctattctttaagtttgtattttttaaagtataatttttaaaagtattcataattataatctcctttttatttaaatctcttgcttattgccattatattatctatactatactttgaaaagtagtgatatttttttcatataatttcaaaaaagtaagtatagtgagaaatcaacggttgaaaggagttctatttatgtcagaaatcaaacttgaacgaggaaatcctaatgaaaaatgtcctattgaggcggcaatagatattataggtagtaaatggacgtttctaataataagagatttattgatagatggaaaaataagatttggagatttgttacgctctttagatgggataagccccaaaacactctcccttagactacgtgaattagagaaatttgggttagttaaaagaatagtttatccagaaattcctccaaaagttgaatatgaattaactgacaaaggtaagagtttagaaactgcattcatagagttgaagaagtggggacttacaattttagaatagccaaaaattctattatgtatgcttttttccctataaactctttctttaataccaattaaattaggcaccttcaaaaattgctaacattgcagctattctttgaagatgcctaaatatataaaatatgacgctaggcattaccctataacgctaaattatatcttttttaaaatatttcattaactaagtttactttttatcattatatatcatttgttatcttttggtatcattatatacctttttaaatatctattcaatatattttataaattaaaagaataatgttataatattaatcaacaacaatactaaatgataataattggtgaggtgcctaaatgtttactgaagaaagactagaacagattttaaatatacttaataaacatggtagagtaaaagttaaggaactaagtgaacaatttaatgtttcagaaggtatgataagaaaggatttgcaaaggttagagaaaaatggagaccttcaaaggacctatggtggagctatattaaatagaaaaatttctaaattaagctctataactaccagaatgacagttaacttaaatagcaaagagttaatatccaaaaaggcttttgaacttatagatgatggagatattatttttttagagtcctcaagcataaattttttattagcaaaactaatagctaatagcacaaaaaaaataactttaataactaatatgtctataattccaccgcttttcaataacaatgaaaccgttgtattaatatgcataggtggtgtatatgacaatagaagtggcggagtcttaggctcagaagccattaagagcatctctaaatatacttttaataaaggttttttaggaagttccggtgtaaatttaattactaacagcgtaggtacttctatgttagaagatggtaatcttaaagaacttatagtttcaacaagtaaagaagcatttttgcttgttgaaacagaaaaatttaatacagatagtctctataaatttgcaactatagatgaatttgatgctatagttaccgactcaaacatcactgatgatattaaagaacagttgaataatttaactgttaagctgctataagattgaatacatactatagatatccaactttaaaactatatttatgtggtaacttgccgaaatcataaatattttgttccgaaaagctatgaaaatttcgctgaagattctaagcagcagatttcaccactttagcgtgctcccactttcagtgtgacaagctaaagtggaacaatctacaactaagaatcttagtagctcattttcaaatgttttctccacaaatatatttatgatttctagctaagataaccatttatatatagtaaatgtggaaatatgttcatttaataagttaaatatttaaattgaatatccatatagtgtatgctttctttaatatagtaaaagaaagcatacatatgtttattataccccatttttatatatccaatatgaatagccacatggaattactacaataactaataaaataattaaagttaataaagcacttttcatctgcatacaacctaagattatcatgcaaataccgccaagtatccaaagatatcctgccatatgatgagttttattccaattcatttcgctatttaatgtccatggtaatctaataccaacggtataattttgtttgcattttggtaaatagtttccaaccgctacgataataactcctacgactactgatgtaataatttgaataggaattctatatccaagtgcaataaataaggttacgggtactaatacgactgaaataattggagcagaccactttcctaaatacttcaatgcagatggtgaattcattttctttgggtcgttattaagcttaaagtgtataaaaatattaattatcgccattaaaaccggcattccaaacgctccaactgcttttggcacataattatttggaacacctgcataattaaaatgaataggcactacttcaggtaatttatcatataatccaaatgaaagaatcaatggcaaaaaacaaataatagttgtaatacataaaatgttatcttttttcatcttcattgcctccaaattgcgaaaaccaaagcattacttcttcaaataccgatacattgatttcgtaatatataaaatttttgtattttgtctctaaaaccaaacctgctttttttaattgagatatatgatatgaaattgttgcacctgtcatatcaaattcttttgaaatttccccagctgattttttaccacttttcagcattactaaaatttctctccgaactggatctgacaatgctttaaaagtttctggaaaccccaaattatcatctcccttttatattctatttagaaatatttctaaatagaatatatcaattcttatcttcaaagtcaatatctatttagattattttctaaatagatattacttaaaaagaagaaccacctctatctagatttggttctccctcattattttttatttaatatttattgtaaattcatctccaaccttttcatattcatcaaaacctggttctttaccacttttttctggcatttttactgcataaggtgtcagaattaatttacttgccttttcactcatatttccaactaatacattttcgtattttagtaaaaactcatcttttgttccctttgttaagtcaaatattactttattacctaaatcatcatatccttttaataaaatagcgtatgttcctctctcggttgaattattaattattttaccatatattttttgtcctaaagcattatctgtatacttttctaatatatatttatctccattctcaatattaaatccataaccaagctttacagttttagtatcaattttcagcctatctccattagttttaaattcaaacttccaagttccatttatatcatcagtataatttaccatcattttggaatatacaatctttatatttaaatctccacttaaatccatgtcttttattgaatctaaatcatacccaattactgcttgtgtagtattatcatctattttttccataccaccacctgcccctgtaaatttaactttcttattatttatataaagagtcattacaccattccaagtatcgttgtcttttagaattctatctgagcttatatcagtagatatgagtagttcattatcatctaacaccacctcatttaatttaactgttactccattgtccgtaacagatttgttgattactgtattataatcttctaaattcctctctattcctaagaaacttgaaatactttcacttagtaaatttacttttgataaggcgtaaactcctgcatttccaaaagacataccaactagtactgctattattgcagctgcagctattacttttcttccaacattttgttttctactcttttttatagatttcctaatattctttttaagtgattccttttcaatatcattaaaatcttcttttttgtattcatctaaatcgatgtttgcttcattaagcagactatatatgttattcttcatgcttaacacctcttctattatcaatattaaaaatatcgtttattctcttttttgccctagataatctattgtatataacttcttttttcattccatattcgttgcttatttcattaatgtccatttcatcaacatatagcttataaagcagatttctatccttctcctttaaacatccaagcagcgattctacttcattacttaattcattttctaaattcttcattttaataccatcatcactgatatttaaatcatctatattttcatgttgtaagtcttttaaatattttcgtttgtaatcaatgcatttaaacttacatataccagccacccaatttttaaattcgcttttactttcatcaaagctatttatgttgttccaaatccctaaaagaatatcatttatacattcttcttgaacactattgatcccatatagatgctttcctacaatagattttataatccaaccataattatcaataacataatctaaggctttttcattcctatttcttaattctttaatataattatcttcattcaccttcattttttacctcttcccataacgcaagcttgcatttagtaagtttgtacttacatatattaattcgtataaaaaaagaaaaatctatcaaaattataaaataattttaacagatctttctaaattctttgatatttttactttaatgtgcaaagtcccattttgattatatgatattgtttattaaagatataatttctcaaaggtatatatatatgttgcaattcacaatgcacaattcataattagggctaaaattcttgcaatatttttgaagttataatgaagaattatttttgcaatatatatggctttaagtaatctttttctcaatcagattaagtattgcatttactactatagctaagcctgctgacattaaggttccccatagtattttagctgtatttactgttctaagtccatctaataagacgcttccaatcccaccagcattaatagaggctgcaattgtagcaatacctattgtagatactactgcaagatggattcctgcaaagattggcttagtaactaaaggtaacttgatttgaaataatatttggcttttgctcattcccattccagtcgctgcttctacaatggaagcatccacattattaagcccatctattgtgtttcttagtaatatgtactgattataaagtactaaaactataattgcagtaactttaccaagccctgttattggcactaaaatcgcaaataatgctaaactaggaattgaatatatcatagcaaatatattaaccaacaatttagatgctatttttgaataagctgctaatatcgttaataatgctgctaatattatagaaatcactaaagtaattaatacaatttctatatgtcctacaaaggcttttaataatttatcaggatattttaataaatagtcaatcataaatttctaatcctccaaaaatacttcctacccattcgcggaattgggcacaatcaagaaaataacaagttcatctgccagcatattttccaccatccttcgtcggcagattgtcttaatagtcccactatgaagccaatctacctcctcgcctaatgaaaaatattcatgccagctttggacttgttatttaccttcatgtgccttaattagtgattttacaaaatcatttgcaggatttttagcaatatttcttggtgtatcaaattgctgtatctttcctttatccattattaacactttgctaccgagtttaaatgcttcattgatatcatgagttacaaacagatatgttttctttgaagtattataaatctttaataactcatcttgaagatttattctatttattgcatcaatagcaccaaatggttcatcaagcagcattacatcagggttaactgctaaagccctagcaagtcctacacgttgctgttgtccaccagataattgagctggatatctatttctaaattcctttggctcaagaccaacaagttcaagtaattcatctactctagcttctattttttccttaggccatttaagtatctttggaactgtcgctatattacctgctatggtcatatgtggaaacaaaccaacctgttgaattacataacctatttttcttctaaactctactggatctttactgctaatatcctcaccaaaaaattcaatactccccttatgtggatcatacaagcgattaatcatcttaagaagtgttgtctttccacaccctgaagatcctaaaattgtaatgaattctccatgttcaatttttagacttacattatcaactgcgctatatgctgctcctttaaattgtttataaacattcttaaactctattgctatactcatcttgaatatctccttctatctattatttaatagaatcgtaatactccttagctacttcttcgtattcttttttatctacatcaacttctgcgtttaattttgttatctttttagtatctaagcttgcactaactttatttaaaatatcagcaatatctggatgagcatctaatactgattttttaattactggtgctaaattatatggaggccatacgtgtttatcatcttctaataaagtaaattcaggttttactaattgaccttctgttgtagatgctggtgcaagatctgcttcattattcgctaatacttcatactttaaaccattgtcatatacctttgtagatttaaagtcaaactttccataaaccttctctaatcctggaataccatcttctctcttatcaaattcaccttgtgatgcaaatctgatttcacctgcatgtttttgtaaatcagaaatagttttgattccaagtttatttgctacatctgtacgaattaccaaaccttgtccatcatttgctggtgaatagtcaagccattctaaattaaattgcttttcatattcagatttaactgtgtcataaacttgctttggatctgtaattaaatccttctttaaaattgctaataatccagtaccagtatattctgggtataaatcaatttcatcatttacaagcgatgtatgaataactgaacttgctatattaggtactctttctactttataacctttatcttcaagagctaatgcataaacttcacctactattgagttttctgtaaagtcctttgaccctatacggattgtatttttatctccacttgaacctttactatttccgcaagcaacaagtcccccaagtgtaactgtaattaatagcgttcctatgattcttttaatatttttattcataattatcactccccaatctgaattaatctttattatttgtcttttgatgatcttatctaaagctcatatatcattttttcatactctcactaatctataatgattaagcgacttaaaactatatatttgaattaatatacttatatctaagcagatatttttcaaaacctaacataattacatttgcaagcattgaaagaattgctacagtaacaccacctattagaagcaaatctgctctattcagtcctaatccagtgaaaataatgttcccaactccaccgccaccaatataagcagcaagtgtagcactagcgattatctcgaccattgcagttttaattcctgttagcataagaggcgcagctaatggcacctttaccttccaaaaactctgcgcttttgacattcccattgccattgaagtctctatcataaattcaggaattgtgttaaaggcaagtgctgtatttaataatattggtggtattccaagcaacgccaatgcaataagtgctggtttaacacctgttcctacaataggaatgaacattataagaacagctaagcttggaacaattctaagagtgttaaacgaagttgttacccatcgataccatactttgtttttggtagataatattccaaagggaattccaataattgctgctacaagtaaggatagtaaacttatttctaagtgctgccctattgcctgcagataattattcatgtccttttgaaaataatctataatattttgccacatattttcacttcccttgtagaaaaagtataattcctaaaaattttaagttcttacaaaacctttggtaaaaatattaaaagtgttaacgttcctaaaaaaatactatacggctcctaagtcaaagatacatagaattgtgcttacgcttaatagataataatatataattcctatctttgtaagtatatacgacatattcaaaattattattgtaattattgaataaaatttgtaactgctcatatatctttgattgcttagtatatcattaattattagaaactttcctcttttcttccagtaattatatcatataacatttgtctatgcaaacctatgttctcggaacataagtttgctttataggaaaatattgattatttaatattctctattcatctattgaatcaagggcatgcttaagatctgctattaaatcctctgcctcttcaattcctattgataatcttaaagtatcatcatatactcctgctttttctctttcttctttagattgtccaaaatgagttgatgttgctgaatgtacaataagtgattttgtatctccaacatttaccatgtaatcaaatactttaacttcttcaaggacttttcttgctgcctctattccaccttttaatcttatagacattattgcgcctggacccttaggaaaatattttttagctaactcatgatacttattacttttaagtcctgggtaagccactgaaagaactttcggatgaccttcaaggaattcagccaccttttgcgcattagctgcatgttctctcattcttaaagataaagtttcaattccttgcaataaataaaatgcactagttgggcttaagtgtgcacctaaatcagttaaatatctgatcctaagcctcttagtaaacatggttttatccaaaacatctttacctatcgtatctttatattcatcataaaatttttcaaactgagggaatttcccatttagccaatcaaaacctcctttttcaactacagctcctacaattgttgtcccatgacctgcaagatatttggttgcagaatagcaaacaatatccgctccatattcgaatggtcttaataaatacggtgttgcaaaagtattatcaacaattaatggtattccatgttcatgagctagattagccacagcttcaatatcgattatattcataccaggattgccaaggctttcactataaattgcctttgtcttttctgtaattacttttctgtatgattctatatcattttcatcttctacaaaccttccaacaattccgtaatcaggtaaaatgctatttaataaggttgtacttcctccatataaagtattaacagctactatttcatcccctgattttgcgatattcaaaaaagtattagatattgctgccattcctgaacctaatgcgattgcttctatgcctccctcaagtgatgctaatcttctttcaagtaccgtattagttggatttgaaaatcttacgtaagaatgaccttcttcagaataatcaaataatctaatacatctctcaacatccccaagttcaaaagctgctgtttggtaaattggaactgcttttgatctataatgttctgctggattataacctgcatgtaattgtcttgtagtaaaacctaactgattatttttatatgcttcgtaactcattttaatccctctcttttaatttaatcacattcaaaatatatcaaaccgtatgcctaaactttttgaaccatacttaacactctcaatgtttatttaatcgctccctatataaacaaaagcactttctttactaacgcaaaatatacggtgtatattcaagcatgttattttctttcctgtaacttaagcgcctttgtaggacacgaatttgaacaaattccacaacctacgcattttgaaatatctgattttattactccatcaaccttagtaaatacatcaaaatgacatctttttatacaagcgccacacttaatgcatttatctgaatcaagttcaatgatttgatttgtttttggccaaaatccactgctatttcttttctcctgacttctaaataaataacagcaatctccgcagcaattacatataccatttgaattaacagtatgcataagaccttccttgtcagcatttttcactatttcttttgctctttctttatctatttcttctgataaacctctatgtgcaaatgtattaattccatttctatacgtaatacaggttttagttggtcttccacattctcctctaagacttctacaatcgcagtaatttagataaacaggtctatcctgagtatcaatgaattctaacaccttgttaagtggtaagatttcatcctctgtaggccttacactaaaatcagggtctaacccatcataataagccttaaaataccaggcatccatagcaagttgatcttcctttgggatacttctataaacctcttgctcagatattgaaaaaatatctaatctactataaaaatttgctattttatatgtagatgtttcttcatatacaagtgaaataatacctcttctatagctattttttataaactcatctgaattttcatctataattttctctatgtccttcttagtaaatgcatccttgtccatcttatctacaaattcaatttcttctttagtaaatatcttgttgatgaacggataagctacttcaggtatctggaactttttaataaaattttgtaaatccataaacacatccccacagccaaataatttttttgatagtgcctattgcctaaaataaaacaaaaaagaccgcaaaaatccctaagcaggaaaagtctaaaaaagacttaaccaccctaaatttctacgatctctagctttctagtcaatcatttcttatttatttttattaagcacatattatacttatatttattttcttaattcatactaattttatatgattacttttttatcagtatattctctaacctatattttgtcaataaaattttttgattgagaattatataactgtaagaaggctgaaaatcagctttttcaagtttttcagtataactcatcttccaaagacatttttatgttataattatactattttaggatgcatattacacttgcaattgattcaacaagatcttttctcagttttcataaaaaatatgacattcaactaagttatgatttatcacccagctgtaattaaattgaagtaaatatgatttgagaggtttataatgaattacaattttaatgatataacaatttcgaatacatggacgaaaataaaaaaaatagaatatggttggtcatctgatgaaaaatattacatagaagataataaaaatatcaaatatttgcttcgcatatctaatgctgatacttatgaacaaaaaaagagagaatttgaaatcattaagaaatttaatacaccggattttaaaatgtctagagccatagaatttggggattttaatgaacatagaaatgtttatatgcttttaagttggatagaaggttgtcctcttgaagaaaagttgaattctttacctgaaatagaacaatatcgacttggcttaaattctggccaaattttaaaacgaattcatagtatccaagttgaaccacaagatgttcctttggtaaataaaatctctaaaaagttattgcagttgcaaatgtatgaaaattcatccgtccgaatttcaaatgatgaaattgcgatagcatttgtaaaaaataatattgatgtgttgtgcaaatcatctcctgtttatgaacatggtgactttcacattggaaacttaatatatacacctgataaaacaattggtgttatagattttaaccgttgggaatgtggtgataaatacgaagagttttacaagattcaaagttttgatatagaacatagtattgcttcctcagtaggtcaaattcaaggatactttaatggaaatccacctattgatttttggaaagtacatgcagtatatgtagctcatgcgtctttgtactcaattaaatgggcagaaagttttggccaagaagaagttgatggaatgaccaaacgttgtcttcaagcattcgatcattacgataattttaacttgataattccaaaatggtattcacaaaatgaaaataagtacctattataaacatagtgttagattgcttaaaatatcatatattaaaggaggaaacatctcctcccttaactatgtcagcaaattcaccaatcttcatgtttaattaactattcattcttactatttattatgttttttctagcatataaatttgccattacatcaataattggaaatttacacactatgctacattaactatatctattattcaacgaaacccaatcaatcatattgctatttttacatactctttttatttcatttctaacttccattaacgcaaatccgagtaaattttccccgcgccataattctggatttttgatattaacatcctcctcagacatctgtattccccatacattatcatatggacttgcctctactaatattttatcccctgttgaaagaagaaatgtttttaatctttcattttgcatgaacttattataatttccatttatgacaattgaatatttagctcgattccaaatttcttcatcaaaacctcttactttacgtccaaagatctttatttccttaggatcataactattcataattttttcttctatttctttatctccaaaaaatctagctttttctgccatcatatattgttccataaataaatattcagtatgtccaatattgaacctgctcttccaccactggctaaagcaagactttgtaatacccccatcttttttaggatgatgcccccagaaataaatatattccaagttctttccatctttataatctgaaataaggttattcaaatcatattcaggcttgccatctttttgccaagtgtatgtccaataattattatattcataaatattatcttctctttcccatcttttaggctccggaaacatttctttatactttttcttctcatcctcttctaatttattaaaccataagtaaaaatctatagcatatccttcaccatatcccattctccatccaatgcttccatttggaatttcaggatacattagccatagtggagccattaatagatttccatttttattttccataatatctttctccttacatctctgcttttatataataaaacatcactaactaattcctcatcaattgcattagcgacttttcctcattgttctccatcattagtatataaatttattttatcctttatctcaaagctgataaactcttagttagatatctttaaatctttctggattaatgcttgtcttatttatgtatagaactaagaattctttttaatatagatctttagggccttaattaataagacaagagcatatattcctagcacacataagattaatactacaattctaaatataatcactgggattatttgcactattaaaccactcatgacacacctcctgtaattaaaatttgtttctcatacaaatcattctcttttccggaacaccaatatcatttgcaataacatcacatttagtcattaaaagaaaatagatctttttcttttcttcactcaagcattcatagttagcttgccctttagcaattactacatcagcctttttgtagacttctttaaactcatgacttgtcctatctagaaccgttccaagagagccatccccattatcaataacctctgcgtattcatcaattcctacgacatatgcgtcttcagctatagagtcatttacaactggtttacctcgtactccaaagaatattttaacattaggatttagttcttttatttttcttaaaagaatcttgtccatacatatttctccacaattatcacctaagtataataatatttttgaatttaaaatatcttccgctagctctctagaatcatctattgcaagttccaactgttccattttttcaaaataatcaaatatatcctctaataatgtattgtgaataggattgaaatctatgatattaccaacaatggcataccttactgctaattgaaacgaatcttcagcttgctcaatcttcctctcaaattcaggtaacagtttcaaaaataatgtattataataatttctagtttctttatatggatctggattattagtatgtttttttatcatgccaaaaatttctccaataatttctggtgtagttgcctcaaaatccattttactgagatatgtaaaaacttccttcaataactcttccttattgttaacccctgtaatatttgctactttaataacttggttgaccatacacggcaagcatttatcatgcattttcataattacacctctttcttcttaaataattagtattttaaactaccctacaaattacaatttatcttttagctaatgataataaatcttataaataccattctgtttaattataaaaagtatatttcatttataattctaaatcctatcttttcattattaacccaattgatatatgaataatttaaagtttaaattataacaaacttcataattcatataaaccagttactttaaagaattatctaatatactaaaaatcattttttgtaccgttaagacttatcttatatcctaaatttacaattaagttatataatatgtttgttttagattttcttattctcttataaatagattttaaagaataaaactctcttctaaaccacatatatccttcaaatagttcttctgcactcatatttttagggataaaagctactcttgtttttccattgtaatagctccaatcctctgttattaatctcttttcttcttttagctttgaatatactggtgttttaggcagaggagttaatatacttacagtagctccatctattcctagctcattgcaggcatccagagttttcttgaatacatcctttttatctgtatcaaatccaaatattattcctgcttgtacacaaattccattattatggatcttatctatgatacttttatatttatctacatcatttatccctttatttacacttcctaaactatcctgtgaaaaagattctattcctacaaaaaagtatacacatccagcctctttagctaattttaataattcatcatctttacatctctctagcgttacttgtgctgcccactttttattaagttttttcaattccaacagtaattctttcacaaaatttatatccccaaagaaattatcatcccaaaatacaaaaaacttacttttcatggtctttatttcagaaataacttctttaataggccttgttctaaacggctcacaataaatttgctttaaattgcaataactacaattataaggacatcctcttgaagaaataactgccccttttgtaaagtatcttttatgaattagatctcttctcgctattggcatattttttagatcaggtacttcttcgcaaatatattctggttttgctttatcctcatagaaatcttctaaaaattctggccatataatttcgccctcgcccaccattatataatcacaatgtttttttacctcttcttgtaataatgttgcatgaggacctcccattacaactttaatattcttatccctaaacttcttggatatatcataacaatgggcagcatttgatgtgtttaccgttattgcaaccagatgaaatttttcttcaaaaggaactctttgattatattcatcaactagagttatttcatatttattttcatctatgaaagctgctaagtatggcatagttatctgaataaaattattaaattgattttttctaaatctatttatttcctcattctcaggtgttattaaaagtattttcttcttcatacccattcccccaatatctatactatgtaacatggtaatttattagaaatttttaattctcatgttttatattataatcctgcacgttatgaattcttcgtatttactcttcctaacacttttgttctgacataatattttctcttgttcttgttaatattagtataacagaaatatttttccttgacgcatagatcttaagcactattaaaaaattaacacttcaccctctaaaaatgtttttatattcagcatacctactcttctttaatgttcatatcttctatcatcctacatcaacagattgccctaatgactgttatgatatcagacacaaaatattgactgatattttacatcacggaaagttagcttgacatttataaaacacaatgatattattcaagcaaggaaagtaaactttacatgaaaaaggagtggcgatgtgaaaaatcgtttagaggaaatacgaaaaaagcatggcataaaacaagaagagttggcaattgctcttgaagtatcgaggcaaacaattggatcactggaaaacggaagatataatccttcaattatattagcatttaaaattgcaaactattttaatatgagtatcgaagaaatttttatttatgaggaggaacaaataaaatgaaaaaagacattacagcttactttgcattggtattcggattgctactagtaagtatagggttatatttaattaaaacaattattgaaccacaaggaattatgagagcattaccatatgtatgtgtaggattgggatgtggaattttgggtcatggcataggaaatattatcagtaatagagtattaaaaaatcatcctgacattgacaaacaaattaaaatcgaaaaattagatgaacgcaatattgctattggaaatcatgcaaaagctaaagcttatgatatgatgatatttatattcggggctctaattcttactttttctttgatgggcgttgatatggtagctattcttcttttagtttttgcatatttatttattgttggatatggtatttattatcgttacaaatttgataaagaattgtagttaataaacaatattcttatatttaacaattatagataagcaaatccatctataattgttaaatatactttacctgtaaaatatccttatgcattaattcttttacctttacgaagagtgcggaacaaatttaattgaatctataacaaaaagtatcacatatgatacgtgatacttcaatttactatttatttttataactgtatacaataatttattgtccattgctataccatttttttataacttctgtactttcttgacttggataataatgtttgtcactactttgttcgcccactgcaaatatagaaaatcctaaaaaccaaggttcatcttggaactctcttctataggcttcaaaacaattagcttgctcaacgttattaatgtcattattcttatatggattccaattccatggctcatatgatgcgtaatcaaatttaggaaaaccaagttctccaaagaaaataggcttattccatttatcataaaagttttttatttcttgttttatgttttgatgtctaacttgtccaccaaaatctatctgagaattttctattgcgcttgtaagattttcaacagtatttgtaggattatttgtaagttcgaaataagctgctatagaaataaaatctacttttgaaaataacttattatttaacttgttattatatgcagtaatactgtcaggagaccatgaagcagtatcccatttatttgttctgtatgttaccaatcctttataatatgttctaacataatctatcgtatcacaccaactgttttcttctgattccatattaactagattacttcctatgtttagggctgttacattatatggaactgcaatatcagttatcaatgtctttaatacattaatcttccaatttaaaaagaaagcattcatgttattaggtttccattcagtttcagcctttgtcccctgctctacccaaggatatggctctaatattacatttatattggtatttgtattcttcaactgtttaattaaattaattgccttttcttcgcttgttttatcaactatcatattacttgaagaaatattatctacatctatcattacaggtatatttaaagtattcaattgaaacttatttatatcatttaatacttgttcaatattataatctgttgataaactaccagatttaatcttcttcccatcaattgtccatccgattttagaatttgatgtttgatcatttgtaatagtagctgctcgtacattagatgaaataataaaaaaactaatgaaaataattgcaattaaaattacatttttcagtttgtctactgttttgcaattgtttatatatttcatgtatttatttctcccctaacattatgtctttataagttctatttgacattcacccttgtaaatatattcctattataacacaatttaaggtaacacattagttaattcaaaaaacatttttatttgttatgtaagctttacagattgctacgctatatgaaaatagtatcaagccttgctgtctcttttattaatttcatctgttattaacgattttgaaatatacattgcatttatgatattgttaaggcgagtatgatgagatgtcccctcctcaaattttagctgagccttctcacatttactgataatagaagctacaggtggtagtgcttctattaattcttcttttgtatatttatccataatatcttcatctgttattaacgattttgaaatgtatagagcttttaacctattttttagaagtgtatgttgtgaggtaccttctgcaaattttagctgagctttttcacaattattaatagttgacgatacaacttttagtgcatctaccaattcttttcttgtgtatttttccatagaattttacctcctaaactaatctacttaataatttttcttgtaccattataatatctctcatacaaagaaatcaataattcttcaactttcctctcatctggttctttaggcaatgtagtattaactgatgcttctttaaaattgaaatcatataactcgactaacttaaacaattcatcataactatacttgccttttctgatatccattaataaatcatgttctttctctcgataggtgttgatttcatgagtttttaatatttctgttcccatgattaggagccttattaagtgcatagcatgttttaaaagcttcccctcatctttttttctattcctatgattaagcttatcataatcgtgaacaatattactcatttctgagtatatacttttaaaatctcttaaagaatatttatctatatgaatgtccattaatatctctgtttctatttcatttttatcagatttatcaatgtataattttatgctaccctttggaaactctgtataattagatgaaaaatgattcatttgattatttattgtattaagtatatgcttctctttttcttccttcggatactcatcccttgccaaggcgttttgcagtcttcttaattgtgcagtagcataattaccaaaagtgtgtatcactctttttgataagaacaactctctatttttacgtaatgcctccccatatttattcatatatataatatgctcatccttagtacctaataattcaagaatattaggatttccctttaatgctaatgaaacaaatttcctaagtccatatataacagtatcagttgctgtatcttcaaattgttcaaaactttgaaatccatatatattttcttttctttcaattgtaattcctcgtaaatctacatcactattatctatattagtaccatatccaattgaccctgaaagtgttaagtatattatgttttctcctaagttttcatttgaatgtataaatttatattcctctttatttaaaatttcctttgttactttattcattctatatcaccactatattctttaatagtcttatggaaaaattcatttaggatactagaatctctttctttttcagttttaatattttttgcataactataataatattctagcttgtctcttaaaaattccattaattctgtaggttgttttatcgtgtctgactctatcctatcggctttgatagtaacaagttcttctattatcgtcttgactttgtcatccattttaacttctttcatcattgcttgtaaattcataggtggaattgtattgaaattctctatccacatacatgataaaattggcctaataacataaaaaagctttttgacgttaacattatttagaccttccaatccatcaaagcttttctttgcaatatttatataatggtatgtgactgatattggtgaaaagtacttttctgccacctgtcttaattcttttacaagctcttgattttgcctgtaggtaattggcgatgatagccattctaataaagatgcatttgacctgtacattagttttaaagcttttcgaagatcccatccattaacatctaacacctcatctacaggtatttctataatatcagggccttcaaatacacttaaataccattcaactggatgtatataaataaatctcacatcaaaatcactatccttagattcaaatccccagcctcgacttcctgactctattgcatatagtattttcacattatttttttcttctatatctcttaattgagcttgtattactttatccatactcagtccatcccaacagttaaatatgtaatccaataaattattattcatctatacacttcatctatgatacttataaattgcattttagcattacattatacacataatgtaatgctaaaatagttatttccaataataaatctttttccataacctaaaatctttatcatcaagccttttttataataattaggaaaattatcgtaacttccataagctatcagacaacttttaagatctctttcaagttcaatcttatattcattcaaagtttctctaaaaacataatcatgggatgtccaagtatcataaatcttcctatatgattttccactatcaatttcagtggttctacgtaccttcttatttgcagatctcttataccaatataaagactttaatccatatccatcttgataaactggtgtttttttataacttcttgacattatatcgcctccgttacaaggcgtcatctcttcaaatcattatcctcatctcctaacttattttggaaaaaataagtttgaaatcagtgatttaaatattctaattacccttgagctttaaaattataaattggtttgattatttcaataatatcaacagtttcagaaatattttcaagtatttcttccttaggcttatacaccattggagcttcatcaattgtctcttctgtaactgaagttgtaaaaatcccttccattgaagccttaaattcttccaaattgactttttccttagctttagtcctgctcataatacgacctgccccatgtggtgctgagtaattccaatctggatctccttttcctattgcaattatgcttccatctctcatattaagtggaattaatactttttctccttcataggcggaaatacttccttttctaattatattgtctttgaagtttatataattatgggtagtagaaaatgcttcaaattcatcaaaaccttttccaaacagctttttcaaaattatatctgccattgtgtttctatttaagacagcatattcttggcaaatattcatatcatgtagataatccttcctataatctccacttaaaaagcacaactcttttgggtagcttggcattagttcattatatagtgcttctaaatcttttaaagctttctggatttcttttctacgtccatcagctttatattcactaattattttttctcttttaacaaagtaatcacctttaccactgcataaatctattgcaagattttgataaatactagcaacttgtgtccctaaatttctacttcctgaatgaatcacaagatactttatgccatcagcacattcatttatttcaataaagtgatttcctccacctaaagtgccgatacttctttcaattcttttagtatttttcaagctcctataacattttaaattttgtaattctggaaatctaactactcttccttcatggacattcattcctgatggaatatatttatggataatctcatctagcttttctaaatcaacatctactattcctaaatttacagttaacatcccgcatccaatatcaactcctacaatattaggaatgactttatcacccaaatcagctataaatccaataacacaacttgcccctttatgtgtatcaggcattattctaaccttacagccctctacaaaaggttgattacataattcttttaattgttcaattgcttctgtttctatattatctgtaaatacttttgcagtattatattttcctttaacttctatcataaatattactcctctaaaattaaggggagaaaaactatttaagtatttagtgctctaccacctgagctacttataatctttccaaattataagaccgggttcgaaccggtgacatctatcgttaaaatcgaagtaacttaaatatacacttccccttactatttttgtctatataattgattctaatttttccttaaaataatactcttcaatcttgtcctttatattgctaagaccgttttctacatttggtatgaattctagtattttttcattccatcctgcaattatatttactttgtctcctttaaattgctgtgtaccataacctaaaaggtcaattgcatgtacccagacattaggatttacttgctttctatattgatttatcaaatcttggcatactctagcatatccataatttatttcgttgtctgatagaattattattctatcaacataaattttattatctaacaaatgatatattggcaatgaaagatttgtccctccgcctgtaacccctatagaatttgcattagctataattccatttgtagctgcaagtggcgttattttaaaccttgtatcaaaagtacttgttatagcttcatcacaaatgctatttgcgattgccataagaacagtacctatttctgcacaagtagtatcactttttctacttaatgtacttctcatagaacctgatacatcagttgatataaaagtcttaccactaagtcgctctatattatctgtagaaaatctaattgcattttccaatacatcataaatttttgatgttccaagaccttcatttgataatactttaaatgctgaataatatctaaaaggtagctgcttgctatttttaactctattctcattttctaaaatttcatataccttttctatattatctggttcagctttaataatgtttctcaaattacgaagtatagccatataaccaagcttattgctatcaattaatttttcccaagtattcttgttattgccctcacttgaaagcattgtttcccatgtaaatggtgtttctaggttatcctcaagtaatctcttaaacatatcgctttgcttacctgtacttggtcttggatgaactaaatttactatgtccttaagtttaatctcctttgctctattgtattttgcaagagaatactcatcaaatcttatgaaagaatcacctaaacctttcttcagtgaatttggaattggtttaccatatacatttaagtaataacttaaaatttccgccatatcatctactctttcaactatttcacttaaaactcttctaacatacttctttccctgcacatcatgagcaagctctgcagccataacatgagatatacttcttaaatgaatttcttttctagcatatatggccaaatttgctacaaatttcggatctatcttaataacatttcttaaatcgttaactatttctaaagaattatctccataaaactttccttcattaaagaaacttgttaaaacttcagttattaatttttccttcagttccattttaaaagccacatggccttccttatttactgtatttactgttgtgtttctaaaaaaattaaattttgacattttaatttgctcctttcaataatgaagttatatttttcagatgacttatggagttgcaccatactaatactcttatcatcatgtcaaatcaattttaattaaattgatttatatcctttgcgtcctacttgtgaagaaaaaatttaaaacaataagggagaaaacctaaaagtgttcattgcttttattgcaattatctttactccgaagtaacaccttcatgcacttcccttaatttaattagattgtggagtaaatctacctgagttgtttacacttagctagcccaatggtatcactcttctctctgaaataaagttactttaggaattattttaatcttactaaagcattaagtttgtattgtttatttctaaatttaaaccattcctttaacttaatattttaattataattttccttttacgaagtaactcaaatatgcgctgccacatctaattttaatctctatgaaatatggagaaaaaagctatttaagtattctggtggtgtgttatcccttctactatacatattaaaatatgcaattagattcgaaccaatattaccacccctaaaacgaagtaacttaaatatacactgccatattttttcatcaatacaacaatttaataaggagaaaagttatttaagtataatctattagtgctctacctgctgagctactcacaacttttttaagaattatgagactggaatcgaaccagtgacacctatatttaaaacgaagtaacttaaatattcacttccttattgctttgccctctcgactacaatacttattatattatttctataattttcttacagacaaaaactttgcatcttttgaattataatccattagtaccaataaaatgttaaacgcctgtctcaataaaaataatctaaatacacttaagtagcatatatactgaaaagcaaaagagcccgaagttttttaacttccagctctatttcttgattatatataattaagataacttatttatattttccataccttaagttgtttcatacataaatgctcttttaatcttatcaataataatctctctaaccctattaggcgcctttactttaacatatggacctaaggacattattttccttataacctcatcttcttcaaaggtataataataaatatctatttcatatttattttttgaaatggttctagaatttctttcaaatgaagaaaaactcataaaacacctttccatagctcccctgatatcttcaagttcaattgtaattggaacttctgagtatttcttttcctttaatttcttgagaacatcttttctttttatattcgaatctacattattggttattttaacttcctttaaggtatgtaaattaaccaatatagatcgtttctcatctaaagaatatagggatgctctaaatttattatcttttaatgaatactcaattctaattggaattgctaattggttattatattcattgccatttttatctacattagaatataatataggcttctcattaattattccttctaaaatagtatagaaatccttacttaatttttctaaatcaatatcaaagccattttgtactttatttgtaaattctattatttgattacttcccttttctttcatatctgtcaaagctgtttctaatttttttaaggtttcttttccaagtaaagcttgtactactggttccttaatcattccattaacccaggatttttctagctttgaaaatctcactttaagaggtatattatcttcactatttaaaatactataatattttccttctctttcttctaaaaaattgaaattatcttctttaccatattgatttaaaatcatcccttcaaaagttttaaagtcttttcctattactttttcatcgtactcctcttcttcaataagccttataatttcatctttataaagcccattctttgctagatttaaaattctaaacactaaatgaaaatatttatttttatattcatgaaataactccataattatttagcatatcctcccaatcattttttattttcttatgaagatatctaggtgaaataacctttaaatagccaccatattttctaatccacggaatcatttcacaagaatcatttactatatttttaaataaatatttagtatcacttatcttctcaaaagtgcaatctccaagctccccttttatcttttcaactatataatattcatttagggaatcaatcttaacttcaaattcaacttcttcgtatggagtatcagtgttatggggcacacttgaaaaacttttttccatagctaatttatacttttcctcatattcctcataattaaatcttgtttttaaaacttcaatatcatctttcctatcaagccttgcactaatacatcttccagtgctagtaaacgaaaagacgtagaaccttccacattcaacatcgtatctaagcttaaaaggcctaatcacttcattatcatacattttaacacgagtggttttgcaatcatttttaaatcttatctcattcctattttcaattgctctcataactttcaaaatcaattcttcttcaattacaggatgaaaatgcaggtttttatattgaaaacaattcttatcctttggtattacatttctttcaaattctaaataatcccttagtgtatcaaaaaaataatgtccacttacattaggaaaaataatatttttatataaatccactatattataaagctttagaatttcttcattatcaagttcttttagtatatcctctgaaatgtaatactctttaacccgtccattcttattaactgatacgatttccatagaatttgctaattcattaagctttctttctatggttttactacttatattttcataatcaatcaattcttcacttaccagctcattttcaatgtctgaaaaggccattggtttatttttataatttaaaattaaaagcaaataataatataagataatatcagctttagtaaaactcttgcttaaatatgtattgactaaaaagtttttcgtatttgaaatatcatcatagcttaaacttaaaagtttattcttaccatctttatctatcttaataaaatccttctctatatattgtttaattcggcgcatctcataactaacttttcgtgagctcccatgatttttactttctaagtcaccttttgaaaaacatccgtataaaaaaacgtcccgaagtattgaacgtattaaatcataatgcttaataaaatctggaaaaatagaaatccccacctttgcttaatcaatctctagtcagccttataatgatttttcaaaacacttcaaatcttcccatattacattttgaaaatgaaattttgttgtacctacataaagatatccaatcttaggatatagcgttgcagctggaatattgccttcgtaagtatcaaggcgaataactttatatccttgctcttttgagtatttttcaataaattccatcattattttcgctttacctttgccacttgcagaaggtcgaatacacaaagtatgaatgaccataatttcgcttggttttgcctttgtaacccaagaaatattatcatattctttgggttgaatactattaagtactacgcatccatatattccgtctttgtcttcaccaacaaacattgtattattatcaatagcactcctagcataatcaactgttggataaagccccttttgccaatttgtataagacactgtttgttcttcataatccaaaatttcattatatatcttttctatttccaaaatatcatctatagtagcaaccctaaccatcgtctttctcctccacaaatcactgttttttctttcacttattataacatatcttataaataccacacttcgaaatttttaaatgcatttgtaccttacctcataaatactctatatgtgaaatagaaattttgcttataaaaatagagtagctttaagccactctataagattatttatttgattattgattatgattaaacatttactggttatacaattcatttaatcaaaagcctctttctacatccaacactctcgatttcatactattaaattaataagtatatgaataacaggaatttcacttctgtgcaaaataaatcatgcataagaatacaggatctaagcattatcttaatgatgaaataaacgcatctttgtaaatgccataactatattatatttatcacatgtttctatcacattatcatctcttattgaccctcctgtttgggctatataagataccccacttttttttgcacgttctatattatcaccaaatggaaaaaatgcatctgaacctaaagatacgtctttcaaattttttaaccattctttcttttcttccatagttaatggagttggttttttaataaaaagattttcccaacttccatcagataatatatccatgtaatcatcggaaatatataaatctattgcattatctctatctgatctttttattccttttttaaaaggaaggtttataaccctagaattttgccttaggaaccatctatcagctttatttcctgcgagtcttgtgcaatgaattctagattgctgtcctgcaccaatgccaattgcttgcccatctttcacataacatacagaattagattgggtatattttaatgtaattaaagatataatcaaatctctttttgcattatcaggtaatattttatttttcgttggtaaatttgttaacatatcttctgatattttaacatcatttcgcttttgttcaaaagttattccatagacctcttttgtttctatttcctttggtatataatttacatcaatttgtattatcaaataattccctctacgcttattttttaatatgtctaacgcacctttagaatatgatggtgctattattccatctgaaacttcacctgataaaaattttgctgtctgctcatcgcaagtctcagataaagctacaaaatctccatatgatgacattctatctgcacctcttgctcttacatacgcagtagcaatatcagataattctgcatcatcaacaaagtatgttttttttaatacttcatttaatggaactgccacagctgctccagcaggactaacatgtttaaatgaagccgcagctgcaagtccagtcgtctcttttaattcctttacaagttgccaactattaaacgcgtctaataagttaatatacccagcacttccattgatgatttttataggaagttcaccaccatttataaaaattctagatggcttttgatttggattacacccgtactttaattttaattctttcattttaattgttacactccccttcaaacaataataagcccactatctggacttttgcccagacggtcggcttattacttgttatacttcatgtggtttattccacttccgtcagtcgtataacctctatgaaaaaaatatcattttagtgcaaacttgtcaagtgatggaaaatacaatctacatattttttatttttatattgtataaataattggaggtttcctttataataaatatactaatcctactcgcattgtcacactttaaagctacataaaaacctgctaatgaaagtcaatacttttgaagcaggtttttaaattattttttctatttttttgcatactaattagaccagctgtttttctggtccaagcctttatttattaaattgtttattacttatatacttcttttactcttgcataatatattcttaaaaacttatttaatccagcaattttagctacttttgaagcttttccttcagcttccttttttaaaacaaacaaatatacagtatcactctctggtttattgctttttaaacatttcattatttcaaatccagtttttcttagggtagcagaacctcgctttgatatccgccttcgcgttccggtaaactgtcctgattgatatggtggtgcatcaatgcctgcatatgctatcaatgcttttccgctatggaatcttctaatatctcctatctcagccattagtcttggtgcaataatatcacctactcctgccatttcacgaacaactgtatactcctttaaagactttgctaattcttgcatttgtgataaaatcaatgcaagagttttatctatttctcggagaactcgaacggcttccaatactaacattttggttgatggagcattggaagataaagtagggattccttgctgagctaagtcatatatctttatggctttcgcttcgctttgttgatatcccttcttttttgcccaatttttataattgctaataaactggttctcacttttttttgtaatattatcataatgccagtattcttcaataaaatcatttagcttatctttttctggtttatctgaacggcttttcagcatagttttaattcccggcattgtgtagtcaagcattgtagttaaagatagtttactttctattcggagtttaatgtagtgaccgtactgtcttcccagaagacgtagttgcacataaatttcttcactagattcatggttaattaagtgaaaccagttatccaaaccataattagcaatctttatagaatccagcttatccgttttcccctttctaagaattatgcttgcatattttttcattatcaatggattaataacagccacaaaaattccatgctctttaagaaaactaagcactggtaggtgataattccctgtggcttccattacaactcttacttcatcatcaaggcattttatcatagatactaattctgcaatttgactttctgtgtgcgtaatctcatatggagatctaacgatctcgccgtatggttttaatatacatactgtacttttttcttttgatacatcaattcctacacttatcataagtaacctccaactttatttttgtaattgtctccatccgcacttattacaattcattttggttagttacacgaaagcctctagggtttcaacctgcttaatcgaatatttataataagggatggctgacagtttttatgacggatgttattaatccaaaaataccgacgtcagaccaattactccctaattataaataaaataagtgcaaatgctaacccgacatatctggtttaacacttacacttatacagtaccaaaataccacattttctaaatgtgatatttcaatttgttatctattttttcttgtacagaatgataaaatattataaagatataagttttttagcaaaatcttttgcattttgaaaatccttatcatttggcctgcctttagcgattccaccaattaatttaaatggtccaaaagtatcataacccttgcatgcaaaactaccaacaacattaaaccctttttcttttagcttttgttcaacaaaatcattatatttggttttaccctgtccactcgtagaaaaaacaaatacttttttattagacaaagttggtaacttatcaattaattcaagaatatttttatgtaacttcccataatatattccagaaccaaaacctattagatcatattcatttaatgtatttatctttaaatctcttgtttctattatatcagcatttatagattcgcccattacccttgctattttttccgtattgccatgatgtatagatgagtagattaataaaactttcatattaatatcctcctaaaaatatactataaaccaattataacatactttgtaaatattcaattgttctgttttcatatatattacaattcacaatgcacatctcaaaattcacaagtatagctagaattcttgtaatatttttagaattataatgaagaattatttttgcaacatatatattgtggttaatagtattttaatttaaatattattatatagatttatttttaaaatatcttcttctgtatccttcttcacttatactttcagttaaaaatttatcgagctgccaggtaaaaatattgttatcctagtaccaataccttttctgcttaatacagaaaaatatcctttatgtccatcaacaatccattttgctatagataatcctaagccagtaccaccgttctttctaactcttgctgtgtcagctctaaagaatcgctcaaatatatgtggtatgtccttttcatccattcctataccattatcctgaattgaaaaataaggttcccctttttcatttattcctgtttttagcattataacttcattttcttcagtatacttagctgcattttcaattaatattctagctgcctgcttaagtaaaccaatatcaccatggactattatttcttctgaactgtagtatttatatatgtgcttttcatctatcatcttcgactcttcaagtacttcattcatcatatcatttagtaaaaactccttagggttaatctgtgttttaccattaatccctctagctaaaaataacagctgttctactagatttttcatattttcagattcagttttaatggcttcaatagactcgtttaatacactttcatcattttttccccaacgatccagcatattagcataaccttgaattactgaaattggagtcctaagttcatgggatgcatcagaaacaaaccttgcttgttgtttataagaatctctcattctttccaaaagattatttattgcttcctctaatccatgaagctcactatctcctgtatatattctttcatcagagattacagggctaatcttagagatggcctcctcaagattttgaaacttttcttcatcaaaggctatattactaagtctgcttgcagtttcagctatttcatcaagaggttttagcgtccttctaattttcattgttccaaagatgatttctttcaataggaatattccctctataatagctatagattgagctaccctttgaattatatataaataactacttgcatctttaatcatagttttaccattatcaaaaactactgtatatgtggaactttctatgggaaaaaagacaaatgttcttttggcatttaacaaaaattctccatagaaattaatttccaaatcaatacaccaatatccaataagaaagagtattaaaaatatatcaatccaaagaaactttgaaaatagctttcttacaaaaatagaattcaattttattgcaatagatgtaacattttttgatttattaatcttattcatctttaataacgtatcctactccacgtactgtggttattatctttgttttaaatgcatcatctattttagttcttaaaaatcttatataaacatctattacattagtttctccaatataatcatagccacatactttttccattagtatatctcttgttaatactatgttcttattttccaataaaatttttagtaaagtaaactctctgtttgttaattctatttctttattatcatacgttaccttatgtctcatcttatctaaagacaataatccgcagcttattatgtctgtatctcttttttcaataacagttcttcttttaagcgctgttcttattcttgctaataactcttctattgcaaaaggttttgttatataatcatctgctcctgcatcaagtccagatactttatccataacagcatcccttgcagtaagcattataacaggcaaatctgaagttttcctaattctacgtaatacttctaatccatttatttgtggaatcattatatcaagaagtactaaatctacttcacccttctcagctatttcaagacctaatcttccattatccgcttttaagatttcatatccttcatgtaataattctaactctacaaatcttgcaagtttctcatcatcctcaacaattaaaattttaaccatttttaaatcccctctttaatttaccttttaccttttttacattttctgatattaacttaaatacatgattaatcttatttatttctactctatttcctgatattgaaaactcaaaatcaaagaaaagacctactatatataaaggtataactgcccaaaacgcaaatattaataatactataatcactgtgactggaaccctaagaaatatcttattctctttctttatctcaaagaaaatattattgcatatgtctattattttgcatatttttacaaaaaccccttcaaatctattatccttttttgcattattataattattcccttgattcttattattagttaacaagctatttttatgattttccttatattcattggtataaaagatactaacagatggcttttgaaccttacccttttcttccaaataaacaaacgcatctaaaatgtcccagtttgatcgctcaagcgcaatttttgcttcttcataacttatattagcttcgttttttaatttttctacaagcttataatcttccatagtaaccctccatatccatagctatcggataaagtgaaactttccatgcggagtatactccagctgaatttagttgaacttatacccacaaggggcacctagtacagtagcgtgcagccgttatctcccactagaataaaatggactgttacgtatgctagctatctgataaattataccatttaatctaatacttttatatatacaaaattagaggcttcgaataatttcaaagcctctagtgctgtcattagattaatcctatcctttatagctttctttaaaatcactttttatattatctgctgattctgaagctttatccaaaatatcattaaccttatcagtattaatatcaggaccttctattgaatatttatatccaaaaaataaaccaactaataataatactgaaacaggccaaaaaccgattattaaaagtaacgctgctatcgtaagtgatatccttattggctttttattttcctttttcatttcaaaatagttttcatttcctttgcttataacctttcctataaacttaaatattctaccaataatttctccaatgcctccacttttctttttatgatttttctcattttctttttcattttcttcattattatctacagccacttctataattgtattggctccattattttcaacttttccttgtctttctaaataaattatagcatctaaaagatcaaagtcacattcttgcaacaccgcttctgcttcttcataacttactttagtcttttccattaaaattttaatcatttcatttctttccatattaatcatcctccaaaattttgtattgacttatcatgtttatatagtacttagagaaaattaatctaaaatataagaaagattaaaatcagattaaaagttaatgaatttataaatatctgatctatttcagatctattgtaaatttataattttcatgcaacttatacatatcttcgatttttctcatgcatattttgtattgtgtatttttgtttactcctttgaaattcatcataaaatcatgctgatttgattcatctgaacctacactttgtccaaatacctttctattttgattgtctaataaatacatgttttctgcttggattaatggtacttctccatcagcagtataataaatattaagattatctttattccattccaatctatttattactagttttcctgaggttccctgaggtatttctaacggaagtctacttatgtcataagttaatggatcaccaacttcattgacttcttcataaggcaaaaaagttagttctttggtttctttacttattagactacaatattttaatttttcataacttacctctgaattgctataactgcttaagcctgtatactttatcatatttcctttatcatcaaatatgaaatatctatacttttcatctaaggtgtcagttatttcaatatctgttgataatggggatgtaattatttttttgatattaatcttatcttcaccaatatccatatctttatttatattatattcttttgtatctttcgaagcctgctttttatctatcattaaatttaatttccaacttcctttcaaatcacctattgaagctacatctacattaagctcaaacgaatctaaaaagttgccattttctgattttaactcaaaaacaccttgctcaagtatttcatcacttccaccactactaatttgattctgttcaatatcttccccattaatactgaaatttgcactaactattcctttggcctcttctttgttcttatcgccaattacaatatatgaaagcatgatctcattatcatcagaaatcactttatttaccgcaaacctaactccttgatcatctgcatatgaatatacattttgagtatatttatctaaatctacataatttccactacgtaaaatcttcaatttttcaaatatcggaacacttattccattagcgaaagctgtattattaacagtagctataactaagcacataaacatcattgccgagacaaaatatttcacctttctcctcttataatataatttttttttcattttcttttcaattcgtttgtaagtcagtttatctaattgaaaatcttcattataactattatctatttcagcatagtttaataattcaaagatagtatttttatcaatatctttatttttcatttaattacctccccattatctcattccatttattttttatgattcttcttcctcgagatagcctattatctataacgcttcttggcaattttaaatgacttgaaatatttataatactttcatctaaaaaatatcgcttaatgaatattttcttgtccacatcactcatgttacttataatttcataaacagtttttacattgttattttgaataattttactttctatattctcacttgaaattattacatcttcctcaagttcaacagtttcgcactttctccttaattttctaaagtagtctatagctttgtattttgataccgctactatccaatttttaaaacttgttatgttttcattatattttacagcattattccaaacttctataaaaatatcacttacacattcttcaatatcctctttagtagctgtcccatttaatatgtcataaacaactttgtaaactaaacctgaatacttagaatatataaatcctagagctttttgatttttattttttaattctttaacataattatcttcatttatcttcatgtataatacctcctgaagagctcttcattaactatatacgagtattccatttcatttctatcaaataaataaaaattattatagtaaaataaaattataacgctgacaaaagcttttactgcttattgccagcgttaatttagatatcctattcattaccacattctatctaattacttatcttctaaacataagaatatgatctttttattaacttataagaaattattccgctactactttattttcaagagcatcttttactgcaccgattatacctttagatgaatatgtagcacccgaaacaacatcaacatctgtagattgtttttctaaaatttcatttattacaccctttttggctttactgtaataatcccagtcatcctgctgctctagtacagatactttagtaatcttgccatcactaactcctaccttaacttttatattgcccttatacccagcgctgttaccaacataatatacagaattatcagcttcttcttttttgggcgcggttgtttcttcttttactactgcctcttctgattttatattagtctgctgcctgtattgatttatacaaaaaaacatcaataatacacccagagagcaggcaatttttatattacgtgctttaccttcaaccatcccatatgtgagggtattttttttaggacaatttttaatacattcaaagcagtttatacaattaagcgagttaactgttttattgcaggtagatattttaatattcatatcacatgctttatcacagcgcttacaattaatgcaggagtttgcatctctttttattgtaaacaacctcaaataactagctagtccatattttgctccttgaatacaaaaatatttacagaaaattttattataaaataaggacaaagcggcaaatcctaaaatacttacaaacataataattttagctggtttacctgttagaattaaaaacaaattagatctcgcatcaaattttaataaagaacttataaaacctatagagaaaaaagttactaaaacaaatagtacatatctaagcaatctcaatatcttatcaagtttatctgggattgttttcttttttattttgagcttctttcctactgcagaagataactcttgtagtaaaccaaaaggacacaaatatccacaataaaaggagccacaaattgccgctattataactagtatagtggcactatagctaaaattatttataagcattatagttaatgggagtgctgctattaattgaattatctttcttattccgattttttttacatttattttcaagttatttctccaactttctaattatttagcttttaataatgcttctaaagtaccaattctaacagcttcacttgataaagtagcaccagaaatagtatcaacatctgtagattgtttttccacaattctatctgcaataatatcaaaagctccattagatctatcatcttgaggagttgcttgattagcttttacatttgataccttgccatccttaactgtgactttaacatttacaggactttgcataaaactaattgaactgccttcatattctccgtccttaagatcttttaaatcagctacttgtccacttttagctttctctgctaattctctataagcttgaatttgagcaaaagatgccttccattgtttcattgcatactcgttattatcttcaaaaccttcaaaatatgatggatttttgctatcggcaccttctttacttatcctatctgttaattgtaagactttatcataatctccatttgaaaaagcataagctgcagaacctacatttgaagttgcagtctttaatttgctcttttccttaaagttatctggatttgatgcaaattcaaaggtcttatatgcttcttctttattacctaaagttccaagtgcaaatgctattgttgaggcatcagttgggctatcatattcaatatctttattcttagccttaaattcttcatcatatccttcaactgctaatatctttaaaatcataatttttgcattactatctaaatttaagtctttctttgtattttttactatcttaccgtcttttctagtctcactaacaactgtatcggctggtaagtctattacttttgttaaatagttgtatgctaacttatattcacctacttttaaaagactatccccaaggttatacatccaatagtaatatgaaggagtctcttctgatgattttgtattttcaattaaataacgtaactgtttaatattatcatgagcactttcaagatcaatggaagatcttaattggaaagttgcatatttcacatcctcatctatatctactgtacttggctctgcccactctggccaaacattttcttttttctcccaagctgcaaaagttggttttgcagttgatgatttttcggccgaattgaaatttgcacaacctgtaaacacgctgctccccacaaccaataatgatattaataatttgcttttcttactaagcataaatgacctcctaaataataaaatatgtgtttaagctatcaatttcattgatttacttaaaagtaatgtatgaaaataacgcccttaaaacttctttatcttttcgtcttaatataaaaattttatgtaaattatttataagattaagatataaaaactttactacaaaacaataccatagttgataatgattttcaatatcttttttcaaaagcttgttaagtatcttagctgactctccaatacaaaaatacaattatataaattgcattaaatattttataaaagattatcagcagttaaattttaaaattaactgcactccaaagtttttattcgaacttatttcaatcccaaatttctttttaaacacatgaaaaataataatatgtctgaaacttctatgattacactaatgtaaatccctcagttttaaagaaagtaaaatcttcctttaaaccttttgtaacatgtatttctttatctttagttataaatatagcctccatatcttcttggctatcaattaacttaattccatcctcaagtcctaatatgaatatagctgtggacagtgcatctgcagctatagactgctttgatactatagttgtactcattaaagaagactcagcaggataacctgttctaggatctaaaatatggtgatattttttattatctttttcaaaatatcttacgtagtctccagacgtaacaactgttttatttgctgcattcactgctcctaaacattgccctctttgaagcaatgggttttgaataccaactctaaaaggatctccatttggcttgttaccaagaactgctacgttgcctccaagatttacaaaagccgattctactccatattgtttatatatttcaattgctctgtcagcagcataaccttttgcaatagcccccaaatccacgcattgccctgatttttcaagttttgatgtcttaaactcattatttatacttaggtaattatgcccagtaagttttaaagcttcattaatttcttcttgtaaaggaattttttcactactagtaaagactccccatagtctagcaagtggagctatagtaatatcaaagcttcctttacaaatatctgaataatatttcgccttatttaatacaaataaaacttcatcactaagctcaacttcatattgaccagccgctctatttaacttactcacttcgctagcttctaaaaagaaactcataagtcgctctaatcttttcatttcattctcaacttcaatcgctgctacttttgcattttctccgtaaaccttctgacttattattgttcccatgcaaaagctttccatttcataaaatctatccataaaaatctccttttgtaacgctataatactttgcacaagttgatattttatatcaattgataaattttatcaacccttccttattatatactgttttgctatttatcacaacggtttattaaaaattttaatatggatatgatatgactagacagttagaagtgcttgtgacgaaaaaaagtagccactactcacatttagttgctaccatctttgtctaaatttatctgccatatttttacctatcccttgcattatatagtagtcagtgttatagtgtatttaatattatagtgtgtttggaggtgaatatattggaaattgataaagaggtcctgaaaggatgtatagataccattttaatagctttacttaatgatacacctatgtatggttacgaactgataaaaaaagcaagggaaattagtgatcaaacttttgaaataaaagaaggaactttatatttatctttaaaaagacttgaaaaaaacagttatttagaatcttactgggatgataatgaaagtggtggaggcaggcgtaagtactacaaaattacacctattggcaaagaatatttacataaaaagaaggatgagtggtctttattaaataatataatgaataaatttttgggaggaatttagtagatgaagagtattgatcaatttgtagattctctttataaaggggttgatggaaatttagaagaaataagcgcatttaaggaagaaatgaaagcccatcttattgaaacggttaaagagttgaaaaaagatggtaaaactgaagaagaaagtctcagaattgcatatgaaagatttggtgaaattaaaataattaacactggattattaaatttatttcataaacaaaagaaatttattggattcattttaatctctgctatagttttcttgttaatcggagtaacttcttatatttttatgtctcaaagggatttaaagtttcaaaaagagcaaaatatattaacacaaggaatattagacattgttaaagacagcgatactattacagaagagaataagttaaaaatagaagaaatagccaaaaagtataattacattaattacattgctttatttaagattgaagataattcccaaatacagaaagcaattgaaaaggatagtactttaaatattaatggtacttatagatatccatttgatatcaaaatggctcacgcagcaattaactgccccgcatggttatgaccgttcaacagttgtagcaaccaataaaaaatgggctgtacaatatcaatataaggaatctatttataagtatgttgaaaattattcaagcaggatagtatactcctctttagattattctactgctacttttaactataaaaattcactttatctaattattataggaggaacgctttttgtattatggctagggtttaacatctataataaattaagttttcgtaaacttgagtattagtaaaaattatataacttttcagcgatccttatatttgccataattatagatggataaatccatctataatttttcactctattttatttataaaatgtctttaaattattttatatatgttttttataaagggcttctcgattctttaattcagccttgataatttaagaacacgctccataaatttattattttattaaaacttttctattctgatattaagacttgttttactattttaattaacataaaaatctatgttttcttaaacttgcagccttcaagccttcattattcaagcatattctaaaaaatcttagaatacgatagtgctgctgaattattttgatttagaatcgaaataagaaggagaactttctccatttataccttgtcttacttctcctaaattacttagataaattactaagtaattatttttatattaagctcttctgatcctacatctctagttatgtttgctgtgatttgcgaagtgaatgaatttataaatatttgatctatttcagatctattgtgaatttataattttcatgcaacttatacatatcttcgatttttctcatgcatattttgtattgtatatttttgtttactcctttgaaattcatcataaaatcatgttgatttgcttcatctgaacctacactttctccaaatacctttctattttgattgtctaataaatacatgttctctgcttggattaatggtacttctccatcaacagtgcaataaatattaagattatctttattccattccaatctatttattactatttttcctgaatttccctgaggtatttctaacggaagcctacttatgtcataagttaatggatcaccaacttcatttacttcttcataaggcaaaaaagttagttctttggtttctttatttattagactacaatatttgaatttttcataacttacctctgaattgctataactgcttaagcctgtatactttattatatttcctttatcatcaaatatgaaatatctatactttccatctaatgtgtcagttatttcaatatctgttgataatggggatgtaattatttttttgatattaatcttatcttcaccaatatccatatctttatttatattatattcttttgtatctttcgaagcctgctttttatctatcattaaatttaatttccaacttcctttcaaatcacctattgaaactacatctacattaagctcaaacgaatctaaaaagtttccattttctgcttttaactcaaaaacaccttgccaaagtatttcatcacttccaccgctactaatttgattctgttcaatatcttccccattaattctgaaatttgcactaactattcctttggcctcttctttgttcttatcgccaattacaatatatgaaagcataatcgtattatcatcggaaatcactttatttaccgcaaacctaactccttgatcatctgcatatgaatatacattttgagtatatttatctaaatctacataatttccactacgtaaaatcttcaatttttcaaatatcggaacacttattccattagcaaaagctgtgttattaacagtagctataactaagcacataaacatcattgccgagacaaaatatttcaactttctcctcttagcatataatttttttttcattttcttttcaattcgtttgtaagtcaatttatctaattgaaaatcttcattatagctattatctatttcagcatagtttaataattcaaagatagtatttttattaatatctttatttttcatttaattacctccccattatctcattccatttattttttataattcttcttcctcgagatagcctattatctataacgcttcttggcaattttaaatgacttgaaatatttataatactttcatctaaaaaatatcgcttaatgaatatcttcttgtccacatcactcatgttatctattatttgataaacagtttttatattgttatcttgaataattttactttctatattctcacttgaaattatcacatcttcctcaagttcaacagtttcgtactttctccttaattttctaaaataatctatagctttgtattttgataccgctactatccaatttttaaaacttgttatgttttcattatattttacagcattattccaaacttctataaaaatatcacttacacattcttcaatatcctctttagcagctgtgccatttaatatgtcataaacaactttataaactaaacctgaatacttagaatatatgaaacctagagctttttgatttttattttttaattctttaatataattatcttcatttatcttcatgtataatacctcctgaagagctcttcattaactatatacgagtattccgtttcatttctatcaaataaataaaaattattattatagtaaaataaaattataacgccgacaaaagcttctactgcttattgccagcgttaattttatatctaatcatctatttttcctcttaacttatctatttctataagttgtctgttttttctagatatcattactcatttacatggatagtcaaacacttctgctagttttaaaacaagctgagtatggctagtcaattcttcatacccgtcgttttgcaggcaccacttaattgcagtcataacaagtgctgcatataaatctgatacataatctaaaatttcaggtgactttttattttttgtttcatactggtcataaaaacttctctttaaaaaatcagacatatcatcatacagatgaatcgtatctgtatgaatggtaaaaagagctaaaatttcttctcgtttaacagataatatatgatataaaggttttataaccataagcgtatcttctacatttgtacagtcaaatctctcttttacaccagtttttaataagtcaaatacttcattgcaaagagtttcagctaatttgtatttatctgtgtaatgcttgtaaaatgtagatcggttaatcaaagccctgtccaatatatcttgtactgttattttgtaaaagtctttttgcccaagtaaataaataaaagattcttctatgtttctttttgtctttataacgcgcaaatcattttcattcatatctagcccctccataccattattttaaagaagtttatatagataaacaacactttgtataatttttgtagtttaagtacataaacacttagacattgatgtttgaagcattaaattaaatgagtaaaataaataacaaagggggaatgaaaaatgaatgaattaaaatggtttgtatggctttttccgttattatttattgtacacgatatggaagaaattattatggcaaagcactggcgcaaaaagaatttaaaacaatatatctctctagctataacaccctttggaggtacaaaaaatacagctgggttctcaataggtgtatttgaagaattgattctatggattatagctactatgattggtaatgtcagcggattttatgggttatggtacggtttacttgtggcaaatatagttcatctgatcttatttcatattatattattaccattatcctaccgtcattatgttcctggtgaaataacagcatggctaacatttattccatgttgctatattttaaaacttgcccaaaatatcttgggatactctgctattgaaatttctatctgggtaacaatagggattatattcgctttcgtaaatatgaagatattgcataaaaacattaataaattatctgaattagtggaatgaccatactttgacggtatacatttttacttacggtaatatatatacggttttataatatttagcaacttcaccctcaagcgttaaattagcgcaaataaatattttactaaatgtaaactaactgaaagcatacgttttagctgacacgtatactttcagtttaaatgaatctgactaattccttccatacttttcatttcggcgatatctcataaattctatataaatttcaatgataaactgctattatatttaaatagataaataaatatttataatctaaattaggaatataataataaaatttatataataaggagcgttttcaaatcatgaatatatatagtgagtatgtcattccagaatcggataacattgaaagattactccaaacaaaaatgactcgattagcacacctgctatatacctgtgctccacaggatggtgttttaactctgcccatctctggtctgtctatcattcgttattcaggaacagagatagattgtccaaagactttctatttaccttctttaagtattgttgcccaaggagcaaggtctatctcaataggtcacgagacatacaaacttgataaatcacaaatgttaatgaatccaatcaccctgccaatttctctgcaaactatgaaggcaaccaaatctgagcctctccttattataagggtggatcttgatcccgagcggattgctgagattgttccgaaggtttattctcatggtctgcctgaaataaaacagtggtgtgctggacatgttatgaatgcggatataagcattattgatgcaatgataaggcttttggagtgcttgcagaaaccaggagatgtagaattcattgcaccactgattatggaagaaattctaattcgtctacttcgtggtcccgctgggatttatgttgccgctatgggatttgcagactcagaagtaaatcaagtgtcagaggcaatagcttggcttcgtaaaaatttttctcaggcagttaaagtttcagacttagcaaagctgactcatatgagtgtatcctctttctataaccattttaaagcggtcacttcgatgtcccctatgcaatatcaaaaagctctgcgtctacatgaagcgaggaatctaatgctgtcccaacacatggacgcgaccactgcctgcagaatggtagggtatgttagtaattctcaatttagccgagattacagcgctttttatggagctccccctagaaaagatataggaagattgtatagacaacccaaaaaaacatattaatctaaaatatagcttttattttataatgattgatatgatttttgatccaccaaaaagagaatcaaatcactgctttatcacgcctgctgcatatgagtttgcaggctctccttatattaatgaagaatattctgctggtttaacaccctcaattttctaatgtcgctgagaaaaaataaagatctggagaataaggcaaaaagacaattgaaaaaggcaactattcttgttatgtaacatttataattaatttagtctttgaaccggtactagcctatcgtcttggaatgtcatgctggttcgaatactcttttaattttgaatttatattaggaggtaacaaaaatgaaagttatagcttttgtaggcagtgcaagaaaggacggaaatacttcaaaaatagttgatgccatttgttctggcattaagaaaaatggacatgaagttgaaacttataatttagcagaacttgataataaaggctgcagggcttgtggtttatgtcaagcaaataaagtggaatattgttctattaacgacaagatgactgaacttttacctaagatagctgatgctgattgcattatagttggaacgccagtctatatggtgcacgtgagcggttatacaaaaaatttcctcgatagactatttacgttttttgtagaatccgatcataccacaagacttttaccagggaaaaagtatataactgttacatgtagcggtgcacctgctgaagcatttaaaaatgttacagaatatcttaatcaaatttttggcgactatagtcaaatggtgaatgcaggtaatatcatcgcaggaaacttgcacagcaaggatgatattcttagtcaacaagaaatgttaaatcaagctgaggagataggtcgaaaactaaactgattgttgtaaaacagaagaaatccccctaccatccaggcacggcaaaacttctagccacttttaaaacagcccagcaccttattcttgaaggaaatgtttgtttctcccaaatcattgcggagaagcaaacaactttcccataaacagttttcacaaagataagtgagtccgataatagcccattaaatttatatatatgttgcgattcacaatgcacaattcacaattacggctaaaattctttcaatatttttagaattatgattaagaattatttttgcaatatatatgcaataaatacattatggattatattttagaagtttcctatgacatttatatttaatgcaatcaggggtatgtttagcaatcgaaacagaaaaatgcatattatttttttcttctatctaaaaatgtaacatctaaaaaagccaaaccaaaggataaacccactgcatgagaagcagcattaagcatgtctacattaggacttttaaaaatataatcaaaaacagagttaagtgcaaaaaatatcacaaacttaatagcaaatttacttaatacttttctaagataatcccgtttcaattttctcgcattaaataaagtaattataggcacatacaataacataaatagagcaaacacagcatagctaatcacaaattttaaagccatactattatctatattgccataaacaatgatacatgtaattattgtacatataaaaaatattgaataaataactttggtaaagagtaatgttttactcatataatacccccaacactctatattaagaccattaatatactataacaaataagttatagtatatttctgtaaaatcacattttataatttttatttaaaagattattctatagtagtacaatcttatcattttctaaagaatcctgcaatttctaatgaagctctggttcatcccctactattttgtagctacgttcttcaacaactgttccatctgattttgtttctttaaaagtgattacatcacatccatcagagcttttagtttgagatgtttcataaattagccttacgccattttcaatacgctcttttgttcctatccagtaaggacagtgatttagaaatgaatcattcttcccccaatatacaaataatttgttttctgctgaaacattaatactaggacgttttttctcaacatatcttgagcttacctcagcagttctaccaatttgttttaggtattctttagcctcattctcttttgattctgcaagttgtgaatagctttcctgaccttttaaaatcttgtcccataacttctctggaaacatctgttttatagaattttcacattcctctccatcctcaggttctttatattcgattaatgaatagccactatttgaatctttagaaaatgtcattaccgtaggaatagctccacttccactgatttctgtaaaaattccattttcaaaaccaaaatacccaaaacttacaatagtgtaagcttttaccatatcatctttttcttcaacatctaaaactatgtgaccttctgtagccacttctccccttagataatttgtccctctactttttatggctttgcttacagcttgatcaatattttcagtagtgttgttatttttaacatctgttgaatttacagtattgtttgatgaattgttttctttcatttggacccatgctccatcagcattcaattcataaccaccaacacttgtatttttagccattactccattatcatataaataataccaattgtttttatcctttacccatcctgttttcatatatccgttgctatcaaaatagtaccagttattatcaataaacttccagccacttgaccatgagcttccttctgtataccaccatccgttattatcttttttccattcagcattcgcacccattggaaatattgctagaactccaactaatatcaatcccttaacaattaatttttctatactttttcgattcatttttttcccccactccctttatgattggcaatttaaatttacaattgcaacactttttaagtaacttttattattagcatgattatagcactgagacttacttaatcattttaaattttttaacggaaacaatgcaggtattatgacaatagtaattattgagtaactcataatcaccaaaacatttattgttttatttattcatctataagtccctttattttttccactatataatcagtattagtccaatgaatataatggctagaattatacagtgtttcctgagaactataatttgaccaccttaatagttcctgctgagttttttcccaatcttctccactatcagaggatatcgcaactaatggaatgttataaagatgcccattcttcattacttccctagcattttcatttatatttttaatatactctaaattgcttgtattcccaagatatttataatacatagctatatctatcttctttatatcatctggcaacacattataacgtaaattctcaccaagcaaagggagtttaattcctaaatttccaattgttcttgcaattcctgttacccttaatccagcactaaatcgatttaacatatatgattttatctcagagtcgtttgcataaaattctggacttcccccatctaataaaacaattcctttaacttcagcagggtatttttgtgcaaaacggattacttccaaagaagccaacgaatgtcccactaatatataaggggatgattgtgctgatttttcaagcaattcatgcagctcatcaactaatacatcgatcgttctaggtatatctgttttttcactccatccaaaccctgcattatcaaaacttactgttcttacataaggctgcaatttcatttgtattccataaaaatccgtaaatgaacttggtgttccagatcctgctacaaaaacaacagtatttctaccacttcctgcagaatgtatatacatattatgattgttaatatcaaatacttctccctgaggtactagtatatttgtttccttttcaaccattattctttgcccgactgctccagttaagagcattattataataaagatgataactttttttattcttaattttcttttatttatactcttttcaactccatccatattgttctcctatagcaaaaactgtactgtaacatttgttaattgctttttatactttatttgaaatattcaataacaaatcacagaatttatcgttttcagtatactgtggaaaatgcgctgaattctcaaaccaaataaattctttatgcggagcttctagtgtttcataatattttttcactaaaactgatggggtggtataatcatatcttccagcacagaaatatactggaagatccactttctgtacctcatcaaataaattaaattcactatttgttccccataatttttctgctgaaagtttatttccaaacgcatattttattgcatctaatccatttgattcagctgaaagtaatgatccttttattatgtcattcgtcacattaacatcatgtttaaatggtgagtatttctttataatattttcttgttttaatgtggaatttataacatctttatatggcggactccccatattttctaaatcatttaatgcactactatcttgattctgttttgctaaatccatagcatattcatatgatatacgctctccttctgcatgatcaactacttggccaactccaatatatgatgagattctagaagaatccttctttattatatccattccaagttcagtcccccaagaatgtcctaccagaattatcttttcttttccataagtcttacataaatattcaattatttcttccgcatcttccactatttgattttttgtgagactgtctttatccataaaaaaagaatatgactttcccgatcctctctgatcccaattcacaaccacaaagtcatcttccagctttgactgatactttctcgcataacatatttgcgctaatcctggaccaccatgtaaaaataaaatgataggcttgtctttatcttttcctcttattaatagtgtttggttttgatctccaactctaatactaaccaatttactaatacttttacttccatttatacttggtgtatatgcaggtctaaataaaaatataataagagctaatataattaaagcacttactctttgaatatttttctttttcatatattctctccataacaatttcttatattgcgtcaacttgtacaaattcacaatataaaaagaatttaataaaaaaattttacgtgttaaaaagaagaaagatagcagcaaaataaattattggtactaaactaactataattgctttattatataattttgatttgaataaaagaaaaaatgatatcattactgatattaatatgactgctggaagtgagaaagtggataggaaaaatatccatgtatatatgctttccgtcgaacctggtgaatcaaatgccataggtgaaaccattgctccaagcaaacttaatggaaatatcaaacaaaatatcatattaataattattgttataatcttaataattatattcccattcttttctttatctacttcattcaaaatatgacctatctttttatccatttgtttatttctacttatagattttctaagctcttttacacctttaatcattgctattactatcgctactaccactgctatacaaataaacttaataagtattgacataaaattaattgctgtagaattaatttgcatacaagtccccccagtagttaaaaaaatattctcgtaacccaattccaataaatatattcctaattataacatatattacaagtatcatattgttcaattttcaaaaaacactatttttactaattatcttgcattcatataccattttctaatatgtcagttccaaaaccttttctcaaatctcttatatctctaagtggtggctttccaaaaagccgcttatattctctagaaaattgagatgagctttcataaccaactgccattgctgcactcgttatatccaaatattctcttaacataagacgtcttacctcacgaagacgaagctctttctgatattgtaatggtcccatggtagtaacttatttgaacttatgatgaagacttgaaacactcatattatttgattttgctaactcttccatagtaaaagcactcgtataattttttttaatccattccattgctttacctattccatcaacctgcttttcaacaatcgcctgctgaaaaaataaatatccatattctccagttaatatatgataaatcatttcacgcttaataagttctcctgagaagtaagcatcttctggtctatcattgagtttcaatctgatcgtcttaaagaacttgaaacacaaaaagagcttggtttttccactgattttactgtctaagtccaactgtacgggtttggaatagaaatattagtgtactttaaaattcgcggtaactcattgagttaccgcgaattattatatatcaaaaatcaatatcaatatatttcttattagatttttataagcaaatattcaatcatattttgatcttaatttttcaaaatatatctcagttttaattgttacttttctatttattgccatctattaattctttcaaactaatactaggattagtataacgtcccctgctttgtgtcttattcttatagttaatagcctgctttgggcaccattgaacgcacgccatacattgttcgcaattgtgcttaaaactcggctttttgtttttcattactatgttggaaacaggacaaactgcctcacatgttctacagcctgtgcaagcatcggaaacattaaaacctttgtcttttctggcatatattaatttttgaccaatagcagtcgatatattaaggggctcgttcaccttacccactggctgctgtgttttagctactatcttttgtactaatgcaggtatattatcagtagcaatttgatatttctctggatttctctcgttcattttatacatcgcgacataattttcaaccataataattttctctgcaaaattaagtttaacacctttttttgctaaaattttggcagggacagttaacgcaacaccacttatattgccgcatccagtcacagcaaaaaaatatgcgtttttacttttttcaagcgacatttcgcttataaattgtgttactcttcgtggcaaattcaaggcatatgtaggatacacaaaaccgatataatcatacacttcattgctgtcatgttcccctttacccatggataccaacttacaatccggtaatgcctcagctatttttttagctacctgtaagttgtttcctgttcctgtaaaataataaataacacttttcaatttcaattacctccttatttgtcataataaatatcatccatataattattttgtatagttattatcaaaaatcactattattagctattccttgaaggggctttcatattctcctcacttaatttatcccattgtaatatcatattttttatttatcttggatagataccttttaatagttgcttcattttgaacaaaaaatcatgtacactcacccaaaatatgtccaatagagttatggttaatcgtaattgattacgcaaactctgttaaagtcctgaacgaacattacaagttacataaatataaatttgtaacttataatgctaatataccatacttcactacaaattacaacatactaaacatataacttattataaattttatactaagaatgtttttcctttttcagtttgaccatgcttttataaattatagtcaaagtaagtattagactacaaataaataaagccctcaacaattcttctcagaaagtcaaggactaaaaattttagctcatcatattgggttctagattcatttatcttatactataatctctttaatactatttatcccgtattttatactttttctattgaacgcaacatcataaaagcacatgcacttactgtctaatcactatcattgatatctccaatacttccttcttcgcactctttttcaaaactgattaactatagctattaaactcaaatccatcttctggttcccctatttcaaaacctaatgttgctgaagccttcgtcttaaatagtttaaaccattcatcccattcttcttgttgcatttcagcatagaattgcaaaccactaggttcgacagatgcagttactattcttttgtcattatcttgtgcataccaatgaggaattccatcaataaaaccactccatcccggcattttagaatataattcagctaatttatcccatatataatctggtgatgagtaattaatattcaaattatgattgtgtatttccataagtaattctcctcccccttaacatttcaatctaatcattactagcctaatttggagccactacagcacatccaattatatgaataattagaaattgtattttatttatgacatggttaccgtaagtctaataactatactttaatgcaaatcttattaaatattgatttttgaggaggcttcaataacaaaatctttaaatattttagctgaaggagtcatatatccattcttcaaccatcccatatgcacagttctatagcaatttggttcttttatttttaatactgatacttcttctgttattaaatttggggtgttaggaactatagaaataccaagacctgcactaacaaaacctgttaccaccatactgctttcattatattctatagatgtttttggaacaaaaccaatgctttcgaaaatagaacacatttttcctttgattccttctgaaaaaaacacaaacgattcttcttttaagccttttagaaatacttctgttttatcagcaagatgatgatttttagggactatgagaacaagctcctcattttttataggaactgactctatttcttcataccttttaatatcttcaaattcatcataaaaaccaaaatcaaacttaccatctttaaggccttttaaaatattaaaagttgattgaatcccaaattcaaattttgtatttggactttccttcaaaaattcacttataatcgaaggaataaaatgtgttccaatagtgtaaagtgaagatatggaaactgtgcctgccataggattaattatatcctgtaattcctgaattcctttactaatctcatttattgcagcgttagcatgtattaaaaacatactgccaaaacgagttaattttatattgcggccatttttttcaaataatggtacattcaactcttcttctaattttgaaatagctttactcaaggctggctgtgttacggaaagcaaattagctgctgatgtaaaattctgtgtttccgctacagttttgaaatattctaattgctgccagttcataaatgcactccttaatttataatattttaatttataaaacattaataacaacctataacttttagttattgatttgatgaaaaatatcaattagacatatgatatatatattgatatcattatatcactctataaattacatttaaattttaataggttaattataaattcaatttatgtattagtcaaaggtaatgatgtcttttattaagcaaaaatcttacatattttattatcatctagtaaatacgtaaattaaaatgtcttttaaattgaaaggagaaaaactatgaatgaagtaatacaaaatatcttaacaagaagaagtataagaacttataaagaagatcaaatttctgatgcagacttaaatactgttttagaagctgcccaatttgctccaacagctatgagcaaacaaggctggcatttcacagcagttcaaaataaagaaaagattgaaaagctaatttttgcaataaaagaggctatgttaaagtcgtctatagaacaatatagaaaaatgggtgaaaatcccaattttaatccattttataatgcacccacaatagtcattacggcttatgataaaactttacctataaaggaatctgattgtgctgctgcacttcaaaacatgcttttagctgctcattcacttaatattggatcttgctggattcatatattagctattactggagaagatcctaaagttaaaaacgtacttacagaactaggtgttcctgaagattatgcagtgtttggtactgctgtttttggctataacagtaaagacgaaactaaagcagcacatagaaaagaaggaacttttaatatagtaaaataaaactctagtctggtttccttgatagtatcatgctatggtaatgtaaactcccagctaaatgtagaaaccagaatctataaatactcttccgccagaaatggcggtttcttttttgtactctcaattcatgcaaagtcatttttgaaaataaaaatagatgagcccactagctacgtacaatatctccaaataactacgaatatcttaatgcgttgatacaataatttacttttttcatactatcaatgctaattaaattcacaaactgtttccactatcttaagcctatacccataaaatgtaatgcaaccataggacgccacctacgttcattgaataaataaccattgctatcaatccaactttataataaaaattacagagccatctgctttttacaaaagtcttttctctttttaattcaatttttatttcacccctaatcatttaacaaatgcactccataattttattactcgattaaaatttttctctactaatatttaagacgtattttcctatcttaaaccacataaaaatcgaacttttttaagcctatagccttcaaacccgcattatttaagcatattcttcagaatattagaatatcagaatatatattctagtattctgaagaataaatatggtggagaatatatattctttaccatataagaatattgactaaatgtttttgagcttgttttaaatatctctctaaattttacaaagccttattaaaattcttgcgcctattgcttagtacattcataaaaataaaaaaggaataccaaaagctcttattgctctaagtattccttttaattatgtcagtccattagtataatatatatttatttttattcttgtttctctataaaacaaactaattataagctaaagccatactataaaatatctctaaactagaaataaggattatgcttttgtaaccacaagggtcataatatgaaatgtttcattaggaatttgatggttctgattattagagtaaaagttgttccaagtatgctagttcaaagctcgcctttgaggctagcatcttgggtgcaacttgtaatcttagaatcatccatcataattccttagaaactggaacaacagcataattcttatttcggcgagctatactcataagtttggatatctgtagtatttctatttttatcttttaactaaaggaaaggcaataacatcttttattgtatttgatcctgttagaaacattatcattctatcaataccgatacctagccctccagttggtggcattgctgtatcaatagctatagcaaattcttcgtccattgggcttgctgtttctagtcctcctcttaatttttcagcttggtcatgtaataatatacgctgtcttaatggatcatttaattctgaataagcatttccaagctctactccataagcatatggttcaaatctttcaattagatctggattttctctatgaactttacaaagtggtgatgattcttttggaaagtctataacaaaagtaggttgtattaatttcttctcgctatatgcttcaaaaagatttgttattaattctcctttagaagcttcatttatatttaaaccttcattttgctcttcaatcaaaagagaattctcttttattttacttataatttcttctttagttaaattctctacatcaatacctgtatcttgttttacaagattgcacatagtttctctcttccatggagccttaaaatcaatttcttcttcaccatattttattttagtagagccattaacagacataaatacatgttcatatattccttccataattctcatcatatcttcatagtctgcatacgacatataacattccattagagtaaattctggataatgtgttctatcaatgccttcatttctaaaagatcttgcaaatgtataaactctttctattcctccaacaataagtctttttaaatataattctggagaaacattcatatatacttcacaatctaaatcattaacaaaagttttgaatggttttgcttctcctccaccatatttagtatcaagtacaggagtatcacattcaataaaattcatattatttaaatactctctaattgcagtaattgctttagaacgtttaataaatctttccttaacgtctgaattcattatcatatctaaggatctatgtctctgtcttaaatctgaatcttgaatcccatgatatttttcaggaagggtccttattgatttagataacaattcaaatttgtttgctctaatagttatttctcccgtctgagtcttaaatacagttccctctaccccaacaatatcgccgacatcgattaattttaaaacattgtaattttcacttccaattaactttttactgaaaaatatctgtatatttcctctttcatctactatattagcaaaagttgcatttcccattcttctaagaaacattattcttcctgctaaagaaaacactttactttcatcaatagtatcaaaattatcacatatctcttttgtataagtttttttgttaaaatcgtaattataaggatatggatttattcctaactcactaagtttatttaacttttttattctctccactataaattcatttgcatttgtcattatattttctaattcatttaaattttcatattgctcatacatttttgttaccacctttacttatttattgattaatttaggcatataaaagaaaatatcactttcaattttgccttaagttttttatcaggcaagaaagcggatttacttgttattcttctgatattgccttaatacaaataaaaaaaaccttcacctccaagatttctaatcttgaggacgaaagttataaattcgtggtaccacctcagtttatgtatgcgttgccgtatacacctcttcaagtacatcaaaaaacgagatactctatacctataacggggtattccgtcacatcctacctctattaagtgaaacttgattcatgctgggttttcattcccatctgaattctagtttaacttataccctcaatgggtatcctgtccaaaagcttgtagccattatcttccacctatatgtgagaaagtatcacggattactagctatcggataaaatagactcagtgtgcagctccaagaccttcttcaataaaaatccattgctcaatcccaccatctagagctctctgaaaatgaattattttatttactcttcttttcattgcttttaatacattttacaacaaaaacctgtttttgtaaatataacatctaagaactctcttcatagttttttatcttcaattatcttttataaataggtgagtctaaagattcaagcctaggaagtgatatcccaagtctacgtgcttcagcaagagtatcgcgcacaaatattacattactttcagcttttagattttcactcccactagcacttctcattatttctcttggcagcttaccttcagctaatgctaatttcattacaaaagccacaatacctgcaggtaaattcactgcgatatttattattgtactaaccttagagcccttagctgccatcaatggtgtaagctcccttaatattaaagcaaaatctttaagggcatttgcagaatcaaatagattattaagtgaacctacttttgaggctgctgccatcatgcttgcgttagtaattacgtgaaaccatagccaattacgcatatctttctgttcagaaataccaaaacctgcgtttttaaataagcgagccaccatatcatatctatctttgttagtagtattatcaatgaagcccataaatatgtttttcatgaacccaccatctaatgtgtttttatttataaaagatccaccggcttcggggaatccccaaacaacttgctcttttggaattgctccaattgagtttaaaggctcactaataatattattaaatattagaacagttgaattcttaacaagtggttctaaccaatttattatagtacttaattgattatgatttacgcttatcataatcaaatcaaaatcatggtcagatgacaattcttctatcattttaattttccaagctttatttactaaatcaccttttttattctctctgccatctaatatttttaaatttactatatcgccatactgattgattcttcctttacgcacataaaatgtcacatcattgcctgcttgttctaaagcccatccatattgtgttgaaattactcctctacctatcattaaaattttcattatattcctcctattaaacatgtgttgtttaaaatataagtgtatgttaatataatatttgattactcataaagctacaaccaatagatttttagctatgttgtataaacaacattttattaaatctgttgttttatcaaaggagattaatgataaattatgaatgaaaaagatccaagagcaataagaactaaaaatttgattaaagaatcgtttgtccaattacttgaggaaaaagattttaaatatataacaattaaagatattacaacaaaggcaactataaatagagcaactttttatgctcattatttagataagtatattttgctagaagaactggttatagattgttttgaggaaatgttaccaatagaaattttaagcgctacagatttaaatgaagaaattataaaggaacttattttcttcctttatgaatacaatatctcattttatcaaaagcgtaaaattgattctacatctatagcttctactgtagataatttattaaaatataaaatagacaatcttattgaaaaaatattaaatagtatggtggctagaaatgagttagattctaaagacacaaatatattagtcaaactaatttcatcatcagtatatagttgtgctcaatattgctattttagtaagaatgataaagaatacaatattgaaaaaactattagctttattatgaacgggatgaaagctattaaataaaattattctctgaaaaatgcccttcagcttcacgaagcaaggcatttaatgttctctcggcaaatggatgcgaccgctgcctgtcatatggtcggatatatcagtgattcgcaatttagtcgtgattactcgaacttttttggaagccccccaaaaagagatattgaaaaaatgagagggcagtcacaaataatgtttttacaattcaatctatgatcacaaagtaggtattaagaaatatgacctatgagagcatattaatatatacaaaatgctaaaaggtttattcccgaggataaaaaaataagtgtgtttctgtttcccttaatgaccttgaagcagaaaacacacccatacttttctataaaatatcccttaaatacttggtttatcgttctttcctctctaatttctaaataacagatatccccttaaatcaattttcatttcttatatcttttaatagtccttcaaaccactttacatttactaaatgatgtgaatgggaattctccaacatttttctaaaatatgtaggaatagttacatcatgctcaagagattgttctaataaagaaattttctttttagtttgttcaatttgtatttctattagttttgttagatcctcgcttttatattcatcagcaaatagcattgctgcataaaaagataagtttatataatctgtcttagatccatacttatacattaatttttgaaattccttatctcctagttcagttataatgtaattattagtctccctagtattgtctgatttgttaacttttttaatatattttttttcttctaattgttgaagattgtagtagaatgaacctttagtaaaatttgctatatatttatagtgtctctcttccattaaggctaataattcgtatccataagaaccagggttttgttttaataaacctaaaattagtaatggtatcaaaaaaacacctcctttatgctcttcatcaaaattatattaactattatttcataattataagatttaatcattgttggtttgcatgaattgagatacaaattcctcatatgatatttttcctaatgcaaactccatactttttatatatatcttttcatttttagtatgtgttctagcattatttaaattcagcaactcatcttcgttaattaacggcttcaatacatgttgtctattagaaaaggcctcgaaataacgtaaaccaaattttctttgagaaattgcatcaatatgaataccatcaggattagaagttaaacctgatgctgtaacaaagaaacaattatcttgttcaaaagcaaacttttgtaactcttcattaatgaatttatattcagtgcaacttttcccaaatccttctttacctaaaaattctcctaatccaccaataataattggaatatctggagcattcaactcttttctaaaagcctcaataattaaaagtaatttattataatatactttatagttaccattaacactatcactttctccttgatgccatagaattcctgtgagttcactactttccatagcaaatttagcttcagttacagcatgtctaaaaagtactccgtctacagcccactcatccagtgtgcttccaccctcagcacaaggaattaaaccaatagtatcttcttgattttgacgactccatgcatctgcaaatgaaccggcaagacttattcccgaaacatgcctatcataattgattggctcagtcatcatctgccatctaccattacgcagcatttgtattctttcattataaatttggggtacctcatgaatgaacccacgcccagccatatttgactgtcctaccattaaaaacgatttaatcatttttttcatcctctcttttgtctaatatttactaagaaatgcttttagttctcagtaaatattaagtatttactattaccaataatacatttgtatttatcattagtccaattagactaacatcacttacatattatagtctaattagactaattgtcaactataattttcttcttagcatttatatgggttggcggtttcaacttgtccactttcccttttaattcagtttctaatctaggctagcgctactcatgagttaaattcttactcataaccataacgtttttacttggtctttccaagtcatcccgccctcctttcgtaaaaactttgagcataaaaaaacacaccattcattttagaataatgtgtttattatttattgcttgcttttactcagcaacttcattggaaaaataattttactagatgttattattttttaaaatccttacctatagaaaatgcatttccaagcttatcacctaatccataataaccacggtcattgcctacaaatgaaataggttttagttttgcaatatcgctattccctttttcatcaactacttcttcactaatcttaacctctactatctctcctatgaattgaatatgtgaacctaattcaattgtttttattagtttacattctatatttattggaaattcttcaacatatggtgcgtctacaaaagtccctttggttgctgttaaacctgtatctaaaaatttagaattattctttccagtgactagtccaaagtaatccatttcctttatataattctcactaggaatactaattgtaaacaccttgcttctaataatattctcataagtaagggtagcttttcttatagaaacacctaaagctggaggcgctgctgaaactattcccccaaacgaagcagtcattacatttggttccatatctacattataagtacctattacaagagttggtaatggagagaatgccaatttcgctcctatactttttttcatatttcttccaccttccataaatttttatttaaattatacttttactatcactttaaataatgttgtattgtgaagtaatatgcgcgattaacaataaacgctctaataaatccgtaaattcttttttatactctatgatgcatatctacctccacattgaaactcatatatttatgtgatatgcttattgtagtacgttaaagtaactttaagtcaagtaataatttaaggaggttttatggaaatctttgagtctggagatataccaaaatatacaattaatcaagtctctcaaattacaaacttatctaaacctacaattagatactatgaagatattggcttactttcagatataaaacgagataaaaataatattcgcatgttctctgataataatgttagcagattaacaactattcaatgcctgaggaatacaggctttggaattgaaataattcgtaattattttgaactttcttcagagaatgcaataaaacttaaagatagatatttaatgattttagaacacgaagaattacttctacaaaaaaaagatgaccttgaaaaacaacttactactattcaaaatattaagcttaaatatgaagaagagttaagaaacaagtaaaaaggataaattcttgaagtatttaatctgccttcaatagcatgagcataatgatcagcaattagtattccattttagtttttactatttcctgtaatcatttcttatgaatggctcttaaatcttttcagaaatattatattcgttgatattatccattctttcaaatagtctgttatatctatctaattctgctttatcctcgactctaattcctgaattatagaaagtgatgttgccatgcccttcatttaataaattcatttctttcaaaattcttttaagattttttgcagtgccaatgtttccatcgattatactaacatttgaaggcactaattttctaaccatatccttatagtaagaaaaatgggtacaccctaaaacaatagcctcataattatttaaatcaaatttaaataactcctctttaagatacggtaatactatttgttcatcaaactcaagtctttctgagaattgaactaatcctggaagaggaagtaagtcaacaacatgttcgttatctaatttataaataagattatgtaatttttcttcctttaacgtcaaagcagtggcagttaccaatactcgtttattcatatctttgtttttttcaatggcaggctttactgcaggctccataccaataatcggaatgctatatttacttctcaacgcctctattgctacacttgtagcagtattgcaagcaataactactgccttaactccttgttcaacaataaaatctatagcatttaaaatatactttttaacttcatcttttggttttggtccatatggaacatttgatgtatctgcataatatatataatcttcattaggtaacacttttaacgtatcatataatacagtgataccgccaatacctgaatcaaaaaaacctattttcatctttttctattcctccaataaataaaatttatatgctactccaatgaagctttattgtatcattgttttacataaatttacttcagcaaaacaattataacacatttggtaaacatcacattgttcaattttcaaagtaaaactactttaaaaaattatttttaaatttttgattatcgcaaaaaataagaaatctactattatgaaaattaccttattagtaaagacagggctgatggtgttttatatattcaaattatatgtggagctgtcataactaattataagttacatatttataaacttgtaattagctttattatatgataaaattcaattacaagttacatacttaagcatttgtaactttcgattaaattctataatcatctcaaggggaggaattataatatggaaaaggataatagaaatttgatacagattgatcaatctaaatgtactaagtgtggaagctgttccaaagtctgtccaactggctttataggtatggatgaaaatggaccaaaggtagtaggacagttttgtatcgcctgtggtcactgtgttgctgtttgtcactgcgcagcacttgacaatgtaaaaacgcctttagcaaatcaagtagaactagaaaaaacaccagttcttgacgaagatactgcatctcgctttctccgcagcagacgttctattagggaatttcaaaataagccagttcctagggaaaagatcgaacagcttttaaatgttgccagatttgcgccaacaagtggtaattcacaaggagtttcctatcatgtaattgataatcctgatacattacgcaaaatcacatcggttgcaattgattggttagaagaggcattgaaacacccaccttatgctggatcaccattagaagcaccatttaccaatcatgtaagacactatcgtgagactggtgaggatgttgtattacgtaatgctccttgtctagtaataccaatagttcataaaaattcttcatcaatgggacatgacagtacgcttttttctctagcatatgctgaactttatgcgacttcaatgggacttggaagttgcattactggattttttgacgcttgtgctgcttctggttataagccattacttgatattttgaatttgccagaaaatatgaaggttacagcaggacttatggtcggctttccaaaatacacgtataaacgtttggtagatagaaatccattgcaggttacttggggaaaataataagaaataaattgtatgattcgcattaatttatattttaatgtgactgtgatttagataaccatataagaaatggacgataatagtcggccatttcttatataaaatatttacttattggaattcttaagtccttttattagaagatttataacagattctatgttttgttttctgtcaggatcttcaaatgtgtttggatgaataaaaacgctggttgcaagatatacagatctcgcctcttgataaggagattctgtaaagaatataccttctgtaattccttgcactataaccttctcaatagaattaattccctcttctatacccttttttattacttccattgatctctgagctagttttatgtagtttgcaaacatttccggatcattaatggcactgtgatgtttagcttcaacaaaactttcgagtaaattactaagtttaacatctgctggactatcttcttttaatatgttatttgacggagcatgcaaacgtgtaagccaacgctcggtaacagcgttccatagatctgtttttccattataatatctataaattgcagcatgacttacttttaataattttgccacgtcagttatattcgctttatctggtccgaaacggcgaattatttcttctgttgcattaaggatcgtttctttatctagcgatattttatccaaatttatcaccgctttcttattttatttttaattatatcatttttagttttatgtttcaaattacattaattgtaacagaattaaatttgttgtttctcccattcttttttcagtaatgcgtactgaaacgtattttcatatttaggaattccattttcatcttttataaacgaaataaattctaaaaaacatccctctttacgcatccctaatttttcacacagtttttgtgatcgatagttatcatcttcaacatatgcatataatcttctagctcttttttcgttgaaaaggtattgaaataaagctttcgcactctcgccagcatatcctcttccctcatattgttcattaaaattccatcctatggaataggtgtctggttcttcatacaaataaaataattctccaattaaattctcgtcatcattcaataaaacagcaatatgagagtcatcttcacttttctttttagccactgatatagcctcctcatgtgttgttattttctcacctcgaaaacagttaactctaggattcgataaatatcccagtaaacctttagcgtcagccaatgagaaacttctaagtactaatcgatctgtaataatcttttccataggtacctccaataataaatatcttgcccaagcaatatagtattctagtctataaaaaattaaacccacttatgattttaatttatttatggataattatagcatatctttggaatatcctattattcaattttcaaaaatctatttttattaattgctatgcaaaatctacatatggctcaatattacacacatctaataatatcaattttctatatacatttttttaatatgtggacaatttatgcattaatcattataattgactatttatttgaatataaacattattaatagtcaataatccatttatatttattactttttataatgcaatattttgtttgcataaatattattttcactataactttaggaggtaatactaatgatcccaacaaacacacctgacgtcttactaagaacatttatactttttataacattactagttttaaccagaatattaggaaaaaaacaaatgagtcatctaaccttttttaattactttactggaatcacaattggctcaatagcagctaacatgattcgtgaaaccgaagaacctttttgggatgattttatagggttaattttttggtgtgtattaactcttttagttgaatacattggcttaaaattcagtaaattaagacaaataattgatggtcaacctacaatagttataaaaagaggggtaattttaaaagcttctttaacatctaatcgtgttaatttagatgatttattaatgctacttaggaaacaaaatatattctctattaaagaagtagaatatgctatactagagcctaacggaaacttaagtgtaatgaaaaagccacaaaatcagcaaattactaaatctgatatgaacattactattcctacaccaaaatatttaccatctgaaataatttctgacggaaaaatagttaaacataatttgatagaattaaatttaagcgaagattggttatattctcaacttaaaattcaaaatatatctaatttagctgatataatatatggagaacttcaaagtgatggtacattattcttacaaaagaaataatttatatgcaaaatcttcttcctaacatttttatataacttatttcacataacctcgctaatctttatactaactaaaaatacattacatgatattttaaaattaatctgatcaacaaaaaaaacaccaattatttatatttctcatataaaatcagtgtttcttcgcttttgataattattttcttaaaattttatccatcgcttttccttttgctagctcatctattagcttatcaaaatagcgaatttccttcatagttggttcttcaatgtcttccactcgaacaccacagacaactcctttaatcaaagttcgtaaagtattcattttaggagcttctgcaaagaaagtctcaaaattagtctgtttttccagctcagcttctagctcttctttgctatatcctgtcaaccataggattatttcatcaacctctgtttttgtacgtccctttttctccgccttcataacataaagggggtagacacttgctacactcattgtataaatcttatgttttgtcataatacatcctcacttatgtaattttctttatttataatatttaaagcatttctctgaaattttcactaaaaaccccctcctaataatattaggaatttataagtttaattgaaactattgaacataaaaacaaaaatatgctgacacctattgataaagtatattcttttttcttatttaacttgaaagaattaatacccattattaattgttgtattcctgataacataagcacaattggcataatcatttttagattatggttcacaatagaaaatattgctgttaaaatagttactattgatattgttatattaataatcttgaatttagtattataatacataattatcccctcgaaatccatagcgagtttatttgcatttattcacattaatctaattatataccaattactttcaaatattcaataaaatcgctttctacttataatatgatcctcccataattagaaattaataaaacttttattacttccttttagtattacgaattaaaaaaaatcgtaaattcattttcttgaataatacgattttaaaatttgctatttaattttactgattcataactatatggaaaatattcaacaaatactatataggactatacatattatttcatattaatttttcatacagtttaaacgaatccaatccgtagtttccaaggcccaaatcaacagtatcaatatatttaaatccacatttttcataaagcctaacggcaggcatattaccttcaaaaacatccaatctaattgatttaacttttgacttaacactatatttatcagcaaagtccattagtgctttacctacaccacatttcataaatcttggatgaacagcaaatgtatgtataacaaaaacatctgaatagtcatactcaaattcccatttaacattataatatgccggttcaggctcatggcttaaaataatagaaccaatgattgttccattatgctttgctacataaagatttccgtttttaatgccatcaattgcattttgccttacaggatatataccctttatccatcccggataatttactccatctgccaaataatcatttaaatcattataaagattttctaattcatcaatatcatttacttccccaaattcaatagtaatatctatatgtatcacctccaaatcaattcgaaatataaattttgttttattacaataatttactattacaaatcaattataacatattttgtaaaaaaccatattactcaattttcagagagcatttcttaatttaacacacactttttacagattgtaaattaccttaacgagaaatctgaatttatcgctcataatttttttaatatcctcaatagaaagcttataaattaggactttaatcgaattgatattttagtatatataagtattaaatttcttcataatgatttagaatctttttaattttttcataaataatagattttaatgattgtggtttcactgacttaatagacataccgtatctaatgaaataattagatatgaattcttcttcacccacattaaaaaatccctttataattgtctttgtccctaattctattttcatagaaggatagttttccttataaaaaatatcttttgcactatctaaaatttctacttcgaactgaatacttttatcagattggtagaactctaagggagagtttattaatttttcaattggtaattctaacttatcattgctaaattctaatgaggtcattttatcacatctaaaaactttgtatttattactcttaagctctattccactggcataccactgtccaaacttagaagaaatttcaaaaaactgtatatgataatttacagtctttttatttttcaaatacttaatcttacagctaatttcattaataatgctttctaaaatcttatctaagaattgactaacactattatgcttggatgcttcaaattttaagacctttttcatcttattaatttcttttatttgttctcctgataggcagttttcaaatttttcatttaatttttctatactcaaatgaaaaggtgtagactcgtaggctttcagtgtgagcattgcaaaatataaagcatatacttcatcgatggtaaatataataggtgacaataatctatttttcaatataacatatcttccgtacctaccttgctctgcataaataggcattcccaattcttctaatgaagcaatgtcacgcaaagctgtacttcttgaaatgttatatttatttattaaatcacttaaattaaagtaatctaaatcattcaaatacatcatcatatggtttaatctttctgattttttcatataccctccgttgtaaaattttcctgaataaaggtttcatattttggcacctttgagtattataatctaattatatcaataatatagtcattgatatctaatttattatacaaaggaatatagtgtagataatcaagtagtatttacagtattctatgtattacttctatataagaataagactataataactagatatattgttgtattttgcatagtagttatagtaaactatatgtagatattaatcgaagtataggagtgtatatagaaatatggaagtagtaaaagtaaaaacagaagataataaagaaagatattatgtagctgatgaaaatggactacctatagaaccaatcttaaagtttataaggtttaaagataatactaattttgcaagaaatactttgagaatgtattgtcaacatttgaagttatactttgaatatttagaacaaagagaattagattttcaaaaagtaactattgatgacttagctttgtttgttaattggttacagaatccttataagagtttgaaagtaatacctactaataaagtagattcagctagaagtccaagaactataaatatcgtagtaaatacagtattaacattctatgactatattttaagacatgaggaatatagcaataatatatcagatagacttaaaaagtttgtatctgctccaggtagaaattttaaaggatttttatacggaatagcgcatgaacaaaagaaagttacaagcaatatattaagacttaaagttcctaaatctaagcccaaaactttaactaaagaagaaataacaatactcataaacacttgcaataatttcagagataagtttttattaaacttgctttatgaaacaggcatacgcatcggcgaagccttgtcattatggattgaggactttgatattagtgatatgataattgaccttaaagatagaggcgagcttgaaaataatgctgaaataaagacagtttcaagtccaagaagaattgatatatcacaaaacttagccgatatattcatggaatatgtagctgaatatcatactgaggaagttgaaacaaatcatgtatttataaagataagtggtggtaatcagtataaaccaatgaactatactgatgttgataatctattcagaatacttaaaaagaaaactgagatacacgttactccacatatgtttaggcatagctcactaactattctcagaatggctggttgggaaccagaactacttagagtgagggctggtcataaaaatatttatactactatgcaaacttatatacacccttcggataaagaaataacggaagagtttaataaaactcaacctaatctaaatttagatatttataacgaaggagatgaataatgtgaagatacaagatatcaaaagtaatcaacaaagtaagtatgaagaaattattgaatatctcaatcaagatgatggatattggttagaaaatgataaatgggatatgactgaaagtttatttatgggacataaaccaagaaataaggaaagatttattgatttcagcagaatttcaaataataaacttaaaaatgaagtcaaatattattttatatttaactcgaaagaaaatttattaactagtaagtatataaatatattgtctacaaccttaaaacagttttcagcttttttaaataaatattatattgaaactaaaagttttaataatattgaaaatacatcattcgtatttaaatttagaaattatttattagaaaatggattcaaattattagataataataaaattagttcaacggagatgaattctataccttatgttttagattttatacaaaacttctatgatgatagagaagaaactgaaaaggatatatggtattcaaagaatattaaaggagcaaaaatcccagcaagtggagttaatggtcatattaattttaaaagtattcctatctattacagagatgttgtaaaaagatattttaaaactataattactaagaaaagttggaatcattgtcatcaaataataagtcatttaaattattttttcaccatattctatggtcaaagatataaggatggatttatagagaatttatcaagacaagatatagaaaactatttgtattggttaaacaatgattatgaggataaaaatgctacttataagagtaaatttatatcttatgtaagaacatttttagagtatatacaaatagctcaatatgataaagcacctaaaaaagaagtatcatttttaatatttcaagatgatattccaagaagagagttaaataaagacgaagttaagaaagctaaatttgttccagagcctattttaaagcaattggataataatattaaggatttagatagaccacaattcattccaatttatattttacttcgtgaaacgggatggcgtggtacagatatactaaatcttagatatcataattgcttggaacaaatatggaataacaaagaacaaagttataattattatctttgtggagaaataaccaaaacaggtatagcacaattaaaaatacctatcagaaataaagttgctgaaatggttcaacaatctataaataaggccaaagaattaagtacagaagaaaataatccagagaaatatttgtttaatatctatgaaggtaaactaaaaggagaaccgttagcgaagcaaaatttattacaaaccattaaaagacttattaaagaaaaagatataagagatatcaatggtgaactatatcattttaaaactcactcgcttcggcacacaagagctaaagaatacgtagaacaaggtatgggaattagtattatacaacagattttaggtcatcaaagccttcaaatgacagttcattatgctactgttagtgaaaatactctttatgaaaaatggaaggatactgaggatttagaactattcaaagttgacactaaaaccaacgaacttgaaaaagtggatttaacttctgatgctggtgaaaatctaattagatatgaatatgttaaaaagaatttagacgctgttagagttccatttggagtatgttttaaagcttctaaactaccatgtaaacagcaaatgaatcattgtttaacttgtgcaagcttttgtactacaacggagaatatccctgaatatgaggaagaaatcgaatatgtaaaaaaacaaattgatattagtgaaagatgtggtagagaactttgggcagaaaagaataaaacatatctaaaattacttgaagatacattaacaagagttaaagaacaaaaaattattcataagaacggtaagtcaagggaggatgcttaagatggctggaagtacaaaaggtttaaaggaatttgctcaaaacaaaactaaggtaacattagaaaaagtagataaagccattcgagagctgtcgcttggcggacagaaaatcaacttcaatagtgtatctaatttaagtggtgtatctaaaacttttttatataataatgctgaaattaagaaaaggattgaagaacttagagacaagcaaaccgaaaaagttattaaacaaagacttaaatatgataaaactgataaatcaaaagacattattataatggctaaggataaaaagattaaagaattacaagaagaaaataggaaacttaaagaacaattagaagctcttagagggaaattgtatgaaaaaatgtaatatactcaattaaagaaagtattgcgaaataaaatctattaaaggagaatttatggtatgaaaacggaaaaagaattactagatatactaaagaatgaaaatataaatacatataaattaaatagtaaaattgaagtggataatttaatcgaattagatactttagaagatttaataagatttgccaatggcaacaatattaatagtatattttattattatacatatctagatgaatattgtttatctataggcgaagatgatattaaagaatttaaaattgatgaagatgttttacctattttacaagaggaatttgataaatacaatgaagaagtatctaaattagattttagtaatcctgtagaattaagtatttattgtatttatcaaggaatgactttatttatagaacaagataatagttggtatattaaggaaggcttttatacaccagaaattgcttgtaaatcaataatagaaaatcatctggaagaaattaaattagaaacagagaaaaaagcagatagaataaaaactaatagagcagaattatttcaaaaactactaaatgatagtgagtttcataaatgtactaatatgccactaagaagaatttatgctgataaaattattagaaaaaatatagaaaatataaaacttttttggagagaaaccggaggttggtatgatatatcaccagaagaatttattgaatatgtttggcgggaacataaaagttcaataaagaaatgattaagttatagactacattgtttatatgtagtctatgtataaaacaattaaaatcaatcagtttagcgtaggctacacgagatataaaaaggagattaatattatgagtacaacgctagaaattgctattttcctttcaatgaatggagaagcacaagatgctattaatttttacaagaaacactttaatgcagaacagttaatgattataacatattcagacctggtaaagatgggggataaatcaatagaaattaatgacgaaaataaagatcacatctctcactctgttttaaaaataggtaagactaaaattatgcttaatgaaaatccaatggatgctaatgaaaagtaccaagctggtaataatacttctccatgtattcaaagtgctgatttggaggaaatccaacaattctacaatagcctaattacagatgaaagagttaaaataattgtgccattagccagtaatatatttagtaaagcatatggtattattgaagacccatttggtattaaaattcaattgtgttttgatgagagattaaagtaacaattattcaatgtatgagtaaaatgagatttggaattggtttataatatgatgtttacggagaaatgaaagctactgaaaataatcaatcaagttaatcactataacctaaaaataagctatagcaaaatacattataataaatggagtaggatgaaaacaattattttgtttccatcctctcacaccactatacttcagcaatcaccctacaagggagccctgaaaatccgctcatatttactgggaaagtatctactttaaatggtttatcagctgctttttctaattcatctattagcttatctaaatagcgaatttcctgaatagttggttcttcaatctcttccacttgaacaccacagacaactcctttaatcaaagttcgcatatgattcatttgtgggcttacccaaagaaagtctcagagtcagtcttatttctggaattttacaaaagtattaattgtcctattttattgcattcctcagcaaaccaaattgctttatctggtcctactgctattccatgtggttctgaatttgctgtaggaatttcatattcactaacctctccacttgttgtaattctgcctatttgattgcttccccattgagtaaaccaaagtgctccatcactaccagtaataattgcatgcggtctggcctttacagttttcaaatcatactcattaataattccttccgttgtaattcttcctattctatttccgtttatttctacaaaccacaatgctccatcaggcccacttgtaattccaactggtcctgaccctattgtaggtatagtatattcagtaatctctccgagcatagtaattttgcctattttattgccttgattctctgtaaaccaaagtacaccatcactgccacatactatagaagacgggtatgaactatcattaggtaatttgtattctataacctctcctaaatttgaaattctacctatcttatttcctgtaagttctgtaaaccatattgctccatcaggtccttcagttatcccaaaaggtcctgaatcagcagttgggatactgtattctactatttcaccttttattgtgattttccctattttattagcattatattccgaaaaccataaatctccattcgtcccagaaactattatcgaaagtccagcatcctgtgatggaacaaggtattcttctatttcaccttttacagtaattcttcctatcttattcgctttattttctgtaaaccatagtgcttcatcaatacctgcagtaattccatatggacctgatagagatgtcggaatgtaatattcattaatctttatattcattaaattttaactccttattttatataaattttctccaattgaaaaatatcaatatatatattttcccaaataatacatacaacgtattaaaatatttattaagttaataaaagcataaaaaatcccctccagtttactggagaggatgtcaattattttcatatctaaaaattacccttaactgctatgaaatgcacctaaaactatggaaaagctaacaattcaactttagtccattaattttctttacacttctcaaaatagaaaaaaacatttttgctaacaaaaatattgtgatattcccatactaaaaggtatattattagctaatcatccactccagcgtataacaaaaaacacaaacttgtgcttattgtaaaattgggcttgaaagtgaattaataaatcatagctaatataatacctcccattcttaaatcataaagaaattatatcaataatagattttatttgtcaaataagaattatttaattctttgcttatttatataacaaataggtgaaattacataattattttgaaataacttctaccccatcttctgttacaagaactgtgtgttcccattgtgctgaaagagatccatcatcagtcaatgcagtccatccgttatcttcatctataaatatttcatggcttccagcatttatcatcggttcaattgtgaacaccattccaggcgccaaaaccatatctgttcctctttttccaaaatggaaaacaaatggatcttcatgaatatctaaaccaactccatgtcctccaaattctctaactactgaatagccattattttctgcatgttcctgaatcgctgctccaatatctcctaaaaatgcccaaggtttaactgcttccagtcctttatttacgcattctttagttacttgaaccaatttcctagcttcttcacttacttcaccaatcataaacattcttgatgcatctgaataatatccatttaatatagtagtagcatccacatttacaatatccccatttttaaggacaacatcgtcacttggtattccatgacatacttcattatttattgatatacaaatacttttaggaaatccatcataattaaggtctgctggaattccaccctttgatatagtataatcatatgctaatttatctatctgctctgttgtcatgccttctttgatgttttcactaatcaaatctaaaagaccattattaacctctgcactctttcttattccttcaatttgctcttttgtttttataagatctcttgttggtactatatgtccttttctttttaagtcacttaatttcttatcaaattctaaatgacaatttttatacttcactccacttttacaccaacataaatcatttctgtttaatatcataatattactccttgttttaactatttaattgatcctccatgaaaataacattcataaactttaatattaccaaaatatatttcctcatgcccttgaaaccacttaaattcaccatttataatgcaatgatatttatactgtccattttgataaataataggacctctatatggattctcttcagttactaaactcaaagcttcctttaaaaaactacctgaaaatctttcatccaaaactcttccagtataattcattgaccaaaatggaatatcatcttgccacaaaccttcttcccctgaaaatctttctccacctaaataggtatcaatatattttaagtttccttctacatattctaaatcatgcgaatttggtcttgaagatttacactctccaccatttccagcatacgtagcttttttagccctacatagaaaatcaattatatttctatttatattattaactttattttcttctattgataacctacaattttcttcataatcattgactaatttatcaatgcttactttaaagaactcacttaatgcaattaatctagctatatctggataggactgtcctacttcccattttgcaactgattgtcttgatatgcctaagaattcagctaatttttcttgcgatagaccttttgcttttctaagtgtttgcaattgttcctgaaaactcatagtttaacccctcctggtattagtatacttacaatattatcatatttctaccacctaaatataacacagttgacaactaaaagttgcatttaataaaaaagtaattctaataccaaatattctctgccttattatttgcttatgatgaatttctccgtaacatcagcaaataatagaactactcatcttttttattctgattcattgtcggtcattgctgatattttgttgtcctccatcaccttgttggttagaaacaaagctggaataattcctatcaccatgaatattatacttgtaataaaacctgcctgaaaagcttgatgctcttttttgtaactcaagtgtcggtcctttctgcttatcaccaatattccttaatataaagcagcccagaagcattgtaatatattgcttctgggctgttttttcgcctttatttacgatactgttcaccgcatcgctgtcaagtgctatttttgcctaagggaagatacttaatgattgcctgatatatagagaaacttagtataattttaatgtctatttatcaattaatccaagttcaatcatactttttgcagttgccacgattgcttcttctgctggtcttggctgccacccaagtaacttcttagcttttgcattgctacaagctgtgttttgtcctaaaaacgttgctggcatacgtaaatcctttttaaaaattgccataaatttaatcataaaatccggcagtgccttagtagatactttttttgctgtacttcctaaatatctctgcaaaattttcgcttcttctttatatgtcagattttcacctgtagtagcaataaatcgctccccagctgcttctggacatgtcatcgcaagcaaatgtaattctgcaacatctctcacatcaacgtaatcaaatccaatatttaagaggaatggcatatccccctttagcatcgcacgaataatctgattagagtgggaaaaatcctgtccaagtacaggtcccatgaccgccacaggattaacagctgagagttccatattctctttctttgcaaattcccaagctgcaagctctgccatagtttttgaacgttggtatgcatcaatattgcctgacaagtcagtccaatcttcctctgtgaaaatttccggatgagatttatggcctgaaagcactgcccctgaagcagaagttaggactacacgtttaacacctgccgctttcgctgccttcattactcgcagtgtaccatcaactgccattttcaccatttcatcaccatcatcaggacgtgtggctggtgttggtgatgccacatgaataacataatttgcatcagttacagcctctatccagtttatatcacttgtcaaatctgtctgtataaactcaagattttcaaaatcaactgctccgccttttgcaagcattgacttaacctcatcttggcgtgacaatgtacgaagtgttgtacgaactcgatatccccgtttcaaaagctttaatattatgtgtacggcaatgaagccacttccgcctgttactaaaactaattctttttccataataaatccccctcactaaagtttcacttgtaacctctgtgcaattagcatatactattatcaagatgaaatcaacacagaaacgatcatatgtgacaataagggaggtattgtaatggcagcaacaaatcactcgcaagccatcaaaaaagatacaaaggattttataacaacagctatgctgcagttgcttgcaacagaaaagttgtcagaattgacagtttcacaagtttgtaaacgggcaggggtaagccgcatggctttttaccgaaattttaacgatctcgagcagattttgtatgagtactaccagccaaagattgcagctgtattttatacgattcatcaaaatccatccttctctgataaatttgatatccaattaaagttcttcagcacctttagtgatgatttactttcatctgttgaccgtggatatgaaccaatcattcagcagattttcatagaagaaataaacaaattttatgctcctgatagtggtgaatactggacaactttcatgtcagcaggcgtttatgctgtttggcgaaaatggtttctaagtggacagcaaaaacccctccaagaaataatggaattctttaagcaatttgatacattaaaaaagactttttaatatttatgtttaaatataaaaaagatagaacaattagctttaaatgttctatcttcattacactttaatttttataagttttatatctttctaggattttatccaactagattttccccatccttaaatgctcttaaagataactcctctaacgcttttgaatctggaacaaactcagctccgcaaacgtggatattatcctctaatttccaaccatataagttaaacatattagtaacatatttaatactttctgcacctacttcaggatttgaattagcttgagtaaatatcgttactacctttttacctggatgtctaggtgtaatagtgctgcttccatcatgttcaatcaatggaaatgtacggtctaaccaaacttttgcttgtcctgtaatttggtacatatatattggagaaccaaatacaatggcatctgcttcattaatagcctcatacattggtttaagataatcattaatagcacaaccatcatgggtacggcaatagaagcagctttggcatccacggatcccagcatcgtttaaattaaattctataatctcagcacctttagactcagcaccttttgccacttgttctaataattttgaattatacccattctttcttggactagcattaaaaataactacttttgacatttaatatctctccttttaaatacaaatatttcttaaattagattaactgtctacttaccatatttattctccttcatttgatatttactcaaataaaagtacttggtataattattgtacttaaataaatttatattaacaagaacgcagaatttaatgatcaggtattatttttcttacctaggaggaatagatatggcaagcaaacaagaattagagaaatatttaaatatagtgagagaatcagattttagtgaaaaatgccctataaaagatgcattggaagtaatcggaggcaaatggaaattgaatatattagggcagttactaagaaaagacgtatgtcgctttaatcaattaaaaagagacgtatcaggaataacaaatacaatgctagcaaattcattacgtgaactcgagaatgatgaattaattattagaaatcaatataatgaaatgcctgtaagagtagaatacaccttaactgataaaggaagaaatctgttaccattactttatgaattaactatttggtgggaggattatataaagaataaagaaatttcaaaataatatattgaaataaaccaggctacattttggaatttatatccacaatgtagcctatctttacacattcactaagcaaagcccgtcgtgtaattcctcagatcttatttttatcctataacttcctttgccatattgatcatgtcatccttgcttagttcagtataatccatattaataatgcaataagatagtccatcttcataccacataactgattgattttgactaacctttatttcatctttttcacttccatatccaatttcaagaagccctttatcttgtaagtctttttcttcgtctgttggtttatatccttctggaactgatttgtattgactactagtatatatgattttaactccattatattctacttcagaagcattttttggcatgtttccataaaaatatttgtcatctgttttttcagctgacatggctaaaatttgaccctttttagaaccatcttttttataatcaaaatctgcgctcttgtatttttcagtagcatctcctttttcattacggacttcattgtttacataattaaatgtatcaaatttaaatccattattaaaggattcaacatatttaggggtaaatccaacagtctcgtttactttatctttacttggaaaagttctaatttcagttagatgagatgatgaaccaaatattccagaaagattagttgctgcaacacatgttacggttgttgcaataatgaccattcctgcaattatgaatgtctttggatttaataatttatgtttcatagtaaaaactcctttattatctttatcttttaatatttcatttctaattctgaaaaacatattttcaggatttgaagcatcatctgctttatgaattaaggcttctctaattttttgatctatattttcatcaaaatttttatccatcaagtcccaccctctttaaatttctatgattatattcatcgttacatttaattaaactgctttttaatttttttcttgcactatgaagcctggatttgaccgttccttcaaagcagcccattacttttgcaatttcgctaactgtaagaccattaaaataatatagaactattactgttttttgttttaaatcaagcttttcaatttctgcataaagattattattttgctcttttcttaaatattgctctatagaagtatcaatatttttttcatctaatttttcaaaaatgttatcaactggcagtgattttttatcttttttcgcatatctccacgcaattctcgtaagcattttaaaaaaccatgatttaaaaaattcaggatttttaagactttttatatttttataacagcttataaatgcttcttgtacaatatcttcacttgtatacttgctacctgtaataagatatgagtatttgaatgattcatttttatatatttcaaacaattcacctaatgcgttcatatcaccagactggatttttatgacaagttcttcttcagacactttgctctctcccttcgattcttatcgatgcatctatatattagagacattaagttattaattggttcatttttagaaaaaatttttatcccttcaatttataccagtgatatccgtaattttatctaaattaacatctatctataaataataaatagagtagcatattgatctattattttctagttgctcactatgagaattatggtaaatttaagatgaaaattttgaagaaatggtatacaataccattgaagataaaatttcttacaaagttttacatacaaactatagtaaaggagatagatatttatgataaataaaaaattgatcaaaatccttggtcctatatttgggatcacgacatttatgttagcttccagcataacttatactacagcttttgctgatgatactatagcaacaacggcacccgctactgctacaaccactagcgcgagtgctacttatacagataatacagctacaccaattaaagattattctatagctataaataaaagttcagaagaaaatgggattaaggtgactgttagtagtgcactagctacaaaacataatttaagggtaactcttaaaattgaaggaatcactgatcctaaagcaattgaacataataattcgctttttgaagtatcatatggtgacaaagattacggctttaactctacctcttctagacaatatgcagatgataaaactatgtttttaaccttagaaaaaactaattatgaaggtgaatatcctgaaagtggaaacttaagagttgatgtagttctttcaaattacaaagttaatattggcatggatatacctgtagatttcactaattctattaataaagtatttactaaaaatatttcaggaacaatacctgaaattaattatactttgaaacaattagattcagattctatggggacaaccataagctacactcggcctaaacacaatgaggctgatattgatgacaataatgatttttgggattcacaaatattattaaaagttgataacaatttttataaattaaattctaaaatgggtagccttagagacgatggaacatttattgggtattatgcatctaaattgccagcttatgataatgttaaaaatggaagggatataagtgtaattccaatactttataaagtttcaatggatgactctgatatgatatccaataatagtaataaaaacactaccaccgactctgcaaacaacttaacttatgaaaaagagttcagctcttctagcggattgaagggtacaatatataatgttgaaagaaatgataatagtgtaaaggtatattgcaaaggacagtctgagttagaaagtttaattatagcaagcaatatttctttgaactacaaccatcttaaaggacaaaatgatcctactatttataattacaataagtttgcaagcttttataaggatccaaaagattcccttggctacattgtagaatttgataatgttgataaaaataaagctgctactttaaatattagtcctatgataaaagaaattactacttacaaaatgagtgatgaaataaaactatcaaactaatgaactctatattaaatttatggaaaattatatccatataaaaaattattaaagtgaggagattttatgataaacaaaaaaacaaataggtcattaagttccatgcttggagctgctttaattgttggacttattcaaatgcctgcctttgccgttgataatgtacaagctcaatcatcctatgcagttaactctggattaattggaaataacaattctgttgagcaaaatggagtcaaaataactctaaatagtgttgttggaacaaaaaatgacctcaaagctacaatcacaatccaaaccccaacgccttttgataaagatgacagagaagaagcaaatgttttattaaattatggtgacaataaatttaatggtggaagtacgtcatttaggcatacagatgacaagacattagttataaccattgaatatagattgaataaatctgtattacctgaaaaaggccctttaagaattgatgtagtaatgcaaaaatacaaggttaatgttggattagatgcaaacgttgatttttcagactcattaaaaaattcaatggaaaaggattattcaattaatattcctcaatttgattctacatttaataagttagaatccgatattttggggactcatctttcttttactgaaccggaagaaacttctttaatgagaaataatgatatattaacagaacattcctttatcttaaaagctggagataaaatgtattcgttgagacattctaatagctattcatctggcagtgatgaaaatgacaggtcaatagtaactacttatcaagcagaaggagccacttatgaaaagatcaaagataagacagctataagcttaatacctataagttttactattaactcaaaggatcaaaaaaacttatataaagaagaacataatgataaagacatgcaaactatcaataatgtaagttatgccaagacttttgatttttctgatggaagtaaaggcgaaatctataatattcaaagagacgataatagcgtaaaagtttatctaaaaggagtaaatgaaaaagaaagtttattacttgcaagtagtttgtttatggattataaagatgagaatagtaaaaaagattattatgatcatgattattacgacggtaacgaacgcactactttctacagagactcaagtgattctttaggttatattgtagaatttagtaatgtaaaaaaagatgtaaatactcaaataaactatgacccaaccataagtttaattaatgcatttactgttggagatgaaatccaattatccaagtaaatatatcaaatctataatctaaatctaagcatataataattactgaaacaaatgaagcctcactatagtatccaaattatagtgaggcttcattttattaagaatattaaattattatcaaatatataatttcttgcgtctattaatttaagagactcaagaacatcttaatgattcattctatgaacaaagtgtttaaaactttagagatagatttctcaaattcagattctattatatactattagaattctttattttaaactttaaatttatttgcttcttctatcatttcattagtcatatcactaagcatttgtgcagaagatgctacttcttctgttgaagcattcacttcctctgatgatgctgaaatttcttctgctgatgccgagacttctactgaaattgaagataatccatttattctattcaaaattgcattcttatcattttctatgttatcagcagaacttttaactgtttcaattttaggaatcacttcatccactgcttgtattattttcttgaaagatgctattgaattatctataattttaccttgatttctcatttcatcatccatagtagtcgattcctgaactataatatcagcattgttagatattaaacttattaatttactaatattttcagatgattcttttgattgttcagcaagctttcttatttcatcagcaactactgaaaatcctcttcctgcttctcctgccctagccgcttcaatagctgcatttagtgccaataaatctgtttgttctgcaatactatttataaggcttgtaatctcatttatttcgtttatgtcttttccaagcgatataactttactataaaactctttaaatgaattacttacatttattactgattgatttaatcctttcatttcgctactgctatcatttgccattaaacttatttctctagaattcgaatctacaacttgtatctctttaaccattctcgataacttattactaaattcatcaagaatatctgttatatttattaactcttcagattgattacttgtccctttcgcaacttcagatattgcttctgcaacattttgtgatacgcttgctatctcttctgatatagacgctaaattttctgattgcgaattaatatttgaagaattttctttcatttttttaatcattgttcctaaagattcttgcattgatttcattgcattagtcataacaccgatttcatcttttgaattcaaatacctagtagaaacttcttcacataaattaccttctgctaatgattttaaatgctttgatgtagaccttatgcccttagatatactatttgaaattatgtatattatcccaagtccaattaatatgaatactatggatgatatcgcaactgaaatttccaaagtgcttaattctgatagtatttcattttttgttattgttacccctacagaccaattagtttcttttactggagcatagcttacaaacttatctacaccttcatattgatattcgcccaatcctgtttctccagagatcattttcctttcaatatttgctaacccctgtaaattagcatccttttctgctgcctcaattccattatacatttgagtaactaagtccctatttttatgggctattactactccactgttatttatcataaatgaagcgcctgtttgcccaaacttaacttgatctgttaaatcacttaagtcattaccatcttgtgattccgctaatactcctacaatctcattattgtatttaatgggaaccgcatatataactagaagagttccatcagttttatttattaacggatctgatacgctgcttacaccattcatagctttcttaaaatattctctatcttttacattagaagttgctcccaatgtatttgtaagatttccctctttatctatataacttagtctactgcaaccaatcctcttaacttcacctaaaagaatcgataatttgtcttgtaataagctattaggattatttatatcaggtcttgcagcaatagcctctagtgaatttaattccccctcaattcttccttgaatattacttgcagtttgctctgcaattctaggtaaagtcttgtttaaatttgattttaaaccatttagcgagcttataacagaaactatgcctaatccaatacatacaattcctattatcagcccaaagaatactgttaattttgtttttatacttctcataatatccccctttaatataattaatactttaactcaagatgattaatcctctttaatatcaatcccaaattcatattttatacattttttgacctaataatattattataccatcttttcatcaaaattcgtattattatcatcattggttttcatgaaatattttgctattttaaagctattctctatattattggaaaagcatctctatacatggtcgaatttgctcccataagtcatatttctttaagtattccgtagccagcctaagatttcttattattttttaataaaattcatcattactgttttcatttaattctaagttgcagtttgcctatctatagggttaaaataaaaagactctaggtttaaatccctgagcctttttgcttatatttactttttcaatctaatttaagtttttttataatacttgtattcttatattcattattattatatatataaatacacctgcttcatttttaatgtaataaaatatttattgatcactaaaattaaaccattctattatcttatttacatcattaacatttgaatgtccagccttaggtgaaatatttatttgcgcatgtggaagtaaattacctaaacgtcttgcagtcttatctgaatgtaacattatatcctttgctcccacaaataacactgttggcatggttaatagctttaattcattatcagaaaatataggaattgtctcttttctataattgaagctctttcctataagcttttgatattttaacatttcttctggtatcggctgatttccattaactttataatataatttatctatgcctttttctcccaaaatcccataagcaatagctttaaaaatgaaagatttcttttgtgggcctacgccagaggggcaaagcaatacaagtttagatgccatttctggataacttactgaaaactttattgccagccatgcccctaatgaaatcccaataatatttgctctttcaactgataaattttcaaaaacctccttaagccattctgcataagaagacccacttaatgaaggacggttttcatcacttttcccaggctcacccaacatatctatagcatacactctgtaagttttagaatactcctttatatctcttaaccacattacagaattcatgccactgccatgcagtaatataagaggtggattacttttttcaccgctagctataataaacgtctttccatatttcgtatctacataaaacttttcatatgatagtgccaatttttgaaggaatttatcataaaattttataacatcattttttccttcatttgttttaaatactttgcccatctccatctattttctccttagtatcataatttcgaaatccaactttcagcttctgcagtgtccttaaaagttctaaaattgtttcctttgttagattccatgatcatttctttaaatctatcattaagtttttcttcattttctataataactgcgactttcacgtgataatttataaatttttgcaacgccatacccgcaatcctagtcttaagattgaaaaaatcttcagataatacatttgaatgaaacataattgtataaacgtcattttccatacaaatagatatacaatccaccacatcttgctctgaagaaagtttccatacttcagaagcaaattctatatatttaacattatttttatttaccactttataattcaaaacattcactctcctctatatattagtttgttccacaagcatagaaatagattttagcatttcttcaatgaagcttacattcccccataataaaacccttagcctgttttctttttcatcatatttcatattaattgttgatttccccattttagggtctttacaattcattactgctataagcgtatttgatattctaaagtattgttctttatccacatcatttatatcaacaacagtagatacatttattttttgtttttctgcttctttaacttctccattagtaagaaaatcaatacttgattcatcactagtttttttattatttatattaacattattcttttccataaaaagacttaaatcatgaccagaaattctccattgctttcccactttacttgcagcaagttttccttctgttataaactttctaatagttttgtgatgcatgcctaatatttctgctactttatctattgtataaaattgattttccataaaaaatctatcctttcaaaattgatctatggtcaaattataataattctttttacttacgtcaagtattttattgtattttgttatattttattgtactttattgaacaataatataaaaatctcactacattattgccttttctcaactacaatttagtaaaatttatatataccacaattcacgatgcacatttcacaattacggctaaaattcttgtaatattcttagaattatgatgaagaattagttttgcaaaatatatatatcccttcatattcacaacatttatcataaactttcttgcataaacaaaataataagaaggagaaccacatccacaatccggacttggttctcctccattacttaaatatattattaaattgcaatttataaagtaaacttaacttgtgcacatttattgagtagtaacagcgtaagcgaccatcattatatcaccttttttgattctaaaaaattgcttattttaagttcaatttttcaatcgcccactctgccatttctcgtacctttgaattactatcattacaagcatacagtatatgttctttatattgctctttatagtcatttaccattacattaatagcattaactttccatttccaaacacttgatttatctatataccaaaacttaggctgcataacttcttctaaaaatttataatccattttgattattttttctagagatatttgttcacttaactcctgcagattaggaaattcttctgtttcctgccaacgatttttattcatagggcatgcatcttggcaagcatcacatccataaacccaatttcctatttcttctctatatttttcattagtcatatctcttcccataaatgtagttatacaagatacacatgctataggattcattgtatatggttttgataatgaagctgaagggcatgcctttatacatagattgcatttatcagaacaaggtcttacatttggtatttctactgcttctaattccttatcaataagccatgcatccaaatacactgatgagccattttcagtataaaagaaattattctttcgaactattccaagtccagctttcatagctgcaaagcgtagtggtacaaggccaaaacctctttcagtttctgctctaagccctaactcttgcatatattcttcaaattttacgctatcttgaaaatctttagaattcttatcttttcttgcatcaaccaaatagtattttgcaatcatgccttttaaatgttctggaatatgatatttgccatatcttcttacacatattacaattgattttgcccaaggataagtatcttgcaattgtgtaaaacgatattgaccttgataaaaacctttggactctggaacacgttcaacccgttcatcaagtctttctttatagccatctatatcagatattttaatgattccacacttttcatatcctaaatttaatgctgcactttttattttatctgctaataaagtcattttctctacaccctttcttaagttaggtaaaaagataataaattatatatgttgcaatttaatttctatatttaactctttattgaactctgtgtttactagaataataaatgtaaatttattattgcaacatatatagtatgcttgtttgttatttatttcacatatcctaattaatgattataattattctctttcaactattaaggcagttccttgacctccaccaatgcacaatgttgcaagtcctttttttgcatctcttttttccatagcatgtagcaaagttactaaaatacgtgctccagatgcaccaataggatgtccaagagctatggctcccccattaacatttactttattcatatctaagtttaaatctctagctattgctatactttgtgatgcataggcttcatttgcttcgattaaatctaaatcctcagcttttaaattgattttatctaaggcagcttttgttgcataaaatgcaccatatcccattattgctgggtctaatcctgctgatccataagaagtgattttagcaagtggctttattcctagagctttagctttatctgcactcataattactaatgctgctgctccatcatttaatccagatgcatttcctgctgtaactgtaccattttccttaaaaataggtttaagtttttttaatgcttctatagtattaccaaacctagggaattcatcttgatcaaatattatttcaccttttttagttttgattactacaggcactatttcatctttgaattctccactcttgatagctttttcagctttttgttgtgacaaaagtgaaaactcgtcttgttcttctcttgttacattccatttctcagctacgttttctgcagttactcccatatgataatcattgaatgcatcccataaaccatcttttatcatttcatcaatgaattctccatgtcccattctttgtccccatcttgcattatcaagtaaaaatggtgcactagacatgttttccataccacctactacgatagcatcagcatcaccagcttttataatttgtgctgctaaacttatagctcttaatcctgagccacaaaccttattaattgtaaatgcaggtatttctataggtagtccagctttcacagctgcttgccttgctgggttttgtccaaggcctgcttgaaggacatttccaaagataacttcattaatttcctctggtttaatatttgctcttttaacagcttcttttattactattgcacctaattcaactgctggtacatcctttaaagtcttcccataagctccaattgcagttcttactgcacttactattactacatctttcatttcttattcctcccatattgaaaagtttatttgttatttttttaacaaattttgatataaaaaatttattcgcattaattatttaataatgttcataaaacttaatagtttaatttgcagctgctctatgactttatattatcagatgattatatatttgtaaaattgatatattcgaattgacaattcgattttttcaatatatcattgaattaacataaagatcggagtgaaattaatggatataagacatttcaaaacttttaaaagtattatagaagagggtaatttttcaaatgcagcaatgaaattagggtatactcaatctactgttacctcacaaattcagcaactagagcaggaactctcaataaaattattcgaaaaaattgggcgtaatatggtattaactcctttaggaaaagaattaataccatacgccgatgaattacttaatacagtgaaaaagattgaaagcattggtaaatatggcgataacatcacaggcgaattaaaaattgctgttgcagaatctttaatgtcttataaattacaaaatgtattagctatgtttaaggaaaaagcccctaatgtaagactttctatggttgcgctcaattgctatgacataaaaaatatgttagccagtggtgaaatagaccttggcttgatgtataatgtgggaagtaaaaatgaaagtttaaatgctgtgaagctttctgattttgatgtagctttagtatgctcccctcaatttgaacaagaaaaattagatttcagtacccctaaccaaaaaataaatacaagccttatcatcaatgaagttgaatccatttatcgaaaaatacttgaaagttatttttttgataaaaatatattcctagataacacaatcgaacttggcagcattgaggcgataaaaaaatgtgttgcaagtaatcttggaatttcgtttttacctcgttttacaatagaggaggagcttgaaaatggtaaattaaaagaactcaaagcaggcgacttaaatgctaaaatcacagcaatatatgctcatcacaagaataagtggatcagccctgcaatgtctttatttattgaattggtgagaaaagattttaatattcaataactatagatatacagctttaaaactaaatttatgtggtaacttaccgaaatcataaatattttgattccgaaaagctatgaaaatatcgctgaaagttctaagcagcaggttgtatccactttagcatgctccaactttcagtttgacaagctaaaatggaacaacctacagctaagaacctttaacagctcattttcaaatgttttctccacaaatatatttatgatttctagtgaagatatgaactcaaagttttagaaaattcgtaaatatattcatctaataagtctgattattgaattggatatctatatttctatataaaattttacccaccagaatatatgacttttctggtaggttcattttatcacttacgttatgcttaagctatacgtcaattttttattcttacaaattttatatttttcttctactatatatttagatccttgggataactcccctaaattgagcctatcattattaatagtctacctaatttaccattcaacgttttttattttctaggtaggtaataatatcttctacatatccatcattaaactctgtctcgcttaatatataataattatctttacttatacactccatatcagccttgtcttttatatatggagatattaaaagtaaggtatcttcatcgtgaattaaattttttaggtcatcatatgtagaatcaacatgaactttataatccatatttttttcttttaatttttgatttaacttttctttcagagtttcagaaagagattttttaaaaatatttaatcctccatccattccaaagggatttggtctagcccctactattactttggcgatgataataatatttttcaattttatttcctccaatattttctcatatactatataataccataaatttaattaaaccccatgctatttatcaaatgtagtaatgaaattagagtatatccaatctactgttaattcacgaatttaccatctataacaatgactatcaatcaagttattagcccaaattggacttcatcactccaaacaaaaaaatagtagcccaatgattactcatggatagctactaattttttaactattataaaattatagtgataccagttgcctaagcaactagaattatatattatatggttttaaaacatatttccgcatgtttatttgccaaattgttcttccgtaatatcaagtgtcgaaaggttaccagcgccactttacttttcaaattagtcaacgcatattactccttttatctaaaatctcataatatagattttagtccaatcagagtattattatctgtagcttttacatcggtatttagcgaaacagatgccaacggagtaactatggatttcttatcctaaaaagaatccatatatacactcttaatcaacgcaagcttataatctcttgttgatcaagaatagtatcttttaattatagtaaagtaccgccagatgcttcaatacgttgacctgtaacccatcccatttcatccgtgcatagactagcgacaacacctccaatatcagaagcttctccaattcttcctagtgcagcatgagaaccaacaatatctttcaaacctggatttttaatataagtatctccactaaattcagtgttaacagctccaggcgctatagtattcacgcttatacctctaactcctaattctacagctaaatatctagaaaaaacttctactgcaccttttgcagaagcataaagtccagaacctgggaatgtaaagcgagttaatcctgttgaagtgttcacaattccacctttgtcagcaataagcggaattagtttttgtgtcaaaaagaaaactcctttaaagtgtatattaactattttgtcaaattcctcttctgtaacttctaaaataggagtgtgatttgagatcccagcattattaattaaaaaatcaaactgctctctattccatttatcctttaaaacatctgataacttatatgcaaaggaatcaaaggaagatatattacttacatcaagctgaatagcagcagctttaccaccatttgcttcaatttcttttacaacttcatctgctttttctttttgattattgtaagtgataattacatctattccttttttagataatgatattgcagaatttctgccaattccacgacttccacctgtaactaatgcaattttattatttgggttcataaaaacctctcctttaaatatttattaaccatttagaaattaatatctcattatttataccgctacttatatttcaaagacagtatttccttagtcatcagttttaatattaatccaagaaggtataagttacttgaaatttaatttcctatgatttatactcatgttaatacctagagatatctctaggtcaagcttttttcaataaattttaaaggggattttaaaattgacttatacaataaaagatatatcaaaaatgtttggaatttctatatatacaattcgtttttatgacaaagaaggacttctaccatttgtcatgagaaataagtctggaaacagagtttttactgaatcagacgtaagtctgtttagaacaatttgctgtctaaagaatactggcatgcaacttaaggatataaaaaagtatattgatttctgcatggaaggtactagcaccatagattcacgaaaagaattacttttagaacatcaagaagtaattttaaatcaaataaatgaactcaatgaaaatttagaccttattcattttaaaatagaaaggtattcatctcctgactcagtccaaattattaacgaagaaaggaaaaaattttatgatgaaaaacgtaaaaataacttgttatagtaatcaaacttgttccacttaaacctcttgcttcctctaaatatttacatatgtactataaaacagttttaatagtacatatttatatttgaaactattctcctataaacatataataagttataaaatgattcatatgtaaatctattataattcttcataaaaattataatagatgaaatattcaatgttaagtttattaattcttctaaagaaacaatctccctacacatactgtatattcataataactatctactcccttaagttttaactaaattataataaaattattatttgccaaaatacttttaatatgtataacaataaattgatacacttaacgtcagcatcagaagtcatatttcaagcaatactcatttatgtgctctttttaatggagtaggtagttttttataaagagtatgtcgatataatctccattgaggagtagaagcatcgtctccaaagaattataaatagccttaaacattttatatcaatgtttaaggctatctatagcatttattttatatatcatttagtaaaactctctatcgaaagtaatgatactcctataagaaggattaatactatatatgatatcttgtatttgagcttgtagctcctttttttcactatctttaaaactagtcttgtccaataccacatcaaataatatagttttttcttcactttttccaacaactctaaaatcatgcatagataatataccttttattactttaatcttttcataaactacttcttttaaggctgtaatctcagggctgtctgtattaattggatccatatgaattgaaagatatacattcattcgtttaccaatttccttctcggccttatctataatatcatgcagttccataatcgatatattacttggaacctcagcatgcaaagaagccatatatctacctggtccataattatgaattacaagatcatgtactccgcatatatatttataacttattacgctgctttttagctcttctacaaattccttttctggtgcttttccaattatagtaccaagcatttctcttccaagttctatacctgaatggagaataaagagagatacaattaatcctatatatccatcaataggaaaagttgtaaactttgtaataagtaaagaaaatgtaaccatagatagaactaagatatcagtaaatgattctaatgctgatgctttgagtgcagaggaatcaataacattacctatataatttgtaaatctattaagaaaaatttgcaatggtattgcacacagcatgcaaataaaacttactttatcaaaaggtatagttacaggatgtaaaacacgtaaaaacgagcttcttagaaattcaaatcctactacaagtatggcacaagaaaataagaacgcagttatatactctattcttccataaccaaaaggatgtttatcatctgccggacgatttgcaagtttaaaactaaatattgtaactaacgaagataatgcatctgttagattatgaaaagcatctgccgtaatggctatactgtttagaaataaaccaataacaatttctagaataagaatagaagaatttattattatcccaacatttcctccaagagtcccgtaggattgccttactgattgggaacttacatttttgtggtctttaacaaattttcttattaaaaaatcaaaaatagacttcatatatttcgccttccaccgttttatcttatttattccacgtatgtttatatatgcgtttaatcaataaattaacaccataaactaactcaataattcagcgtattattaaatattataccataaaattccttatacagcataataaacagctcatatgctaatgagctgtttatcttattatatatttaaagcaaatgatcgggaaaaacctcacttattactgatatggttcaccgtatcagcaataagcgatactccattttccttactctcttattatatttaggcacaatatttattaatcctagtttgctactacttgattattttttattttattattaaaaataatatatagtattgctccagttaaaaaggtaattatttctgtaatggtcatagaccatataacaccatgcaatccatagaaattattcaatactattatgacaggaataaaaagaattccttgtgtaattcccataattgttgatggtattccttgacctgatgcttgaaaaattcctgtaaataatgtagtaaatccattgaaaagtgcggaaataagcatggctgccatgatataaactccgacacttaatactgctgaatcattagaaaacagacgaataattacatttctaaaaataaaaactaaagtaacaaatccacctgataatcctaaaatccataaagctgattgttttatactgtcttttaatctcttaaagttttcattagaaaaattatatgcaattaaagggataattcctaatgcgagtcccattgcaaggaattctggtacttgtacaagtctcaaggcaataccaaaactagctactacactttctccatatctaattgaataattattcaaaagaagtgttgtaataattagaaaaccagctaggaacaattcagaaaccccaactttatatatctctattttatctttaagggaaatattaaaattcttaataaatccttttaaattctcgctttttgtttccaagtagtaaatataataaattgatgaagctatattagccaaaatcattgatactgctactccaataacattaaatttaaatactagtataaataatgggtcaaatataagaccaaaaattgtacttacaaccattccgaacattgattcttttgatgctccttctgctctcacaacttgctccaatgcgaagttcattataattgcaaaaccaccaataaacatagttaaagaataactttttgtataattaataatagcagaagtatctgcccccaaaatcttaacaataggattaagtgctattatagcaattattccaagcaaaattcctatgataatactgctataaaaagaatatccagctatcttcttagctttctctttatcttgtttagcaataagacgagttataaatgttccgcctccagcccctaacatatttccaaaagccattagtatagtgaagattggtagtcctaaagtgatagcagttaacatatctgtattgtttaatagtccaataaaaaaagcattaataacgttatatattgtacctactgacataccgatcatcatgggaatagataaatgtgcaattgccttagtaatcggtgcactttctaaataatattcgtttgaaaatttttgtttcataatttcagcctccataataagtattattagaattcgtattcttagaattctaagtttttagttataagttattatattaataacttatagatttctatctactttcaataacaaagctaacaaagtttccttctcttgttccgtcaagtttgcaataatattttcctctgcctcagctaccaatttattaaaatcttctatgagttcagcacctttaggcagtacatatatatatttttgtctctcattttctttaggaattcttctttcaatatatccttttttctctaatccttgcagcatacttgtaatacttgcttctgtacgttgaaagacttttgccaaatctttttgaataataccactgtcttgatgttcataaatataacctatcatacgtccttgttgagaattcaatcctaactttttgactttttcatcagaactgagtttcatttttatcgcaatacttctaattaattgtgaatatggtgtttctacagagtatccagaattagtcattcaaattcctcctaaactttacttagaattctaactatttatagtttaacaattagaccttcaagtgtcaatatttatttcttataattatttttatatttataatatttctttttttacatgctatcttttacttatgatgaggttcaccattcattatcctaaatcatcttctaatattaattctttttatcctattacatcaactacccattctagacattatgcgaaactaatctagactctaaaaacattttattgcaaaataactaaatttatcccactgaaaaaaattactcttttcgaatttatataatataggttttaatttgaggttattaatcaaaataatttcaaaattaaatctttatattccaagtaagtgtattaacatgattttttggctctaaagagtcatgaaataaatacctgtgagttgcactctcccctatggggtgaatgtgtcttatggattttcattaaaatttaaaggagtgatgtattatgaaacacgagaaattaaaaaaactagttgctctcactttagtaattggacttacattaactgaaatgccgatgcttgctaaggcagcaacaacaaattcaacaataactacaaatccagcaaaacttgcgaatctaacggagacatcagtatcaaagcctagtgaagttccaagtaacatatggaaatatgcatataatgtagataagaaatttagtaagaatggagattttgcattattattatgtgcagttataaaaaaagagagtaattttggtgcaggcttatctggcagtccctcatctggtgatggattaatgcaagtggaaccaagtacaagaaatgcatatgcagcaaagtttaaatcaacatatggacgaacttatgatcatggaaatcttcaagatcaggtagcattaggtggattgattataaaggagatggttgatcaatttggtggtgtatataatggtttattgcattataatggaggtccaaactggtatccaggttgcacagactcatatggtcgaccaatcctagctgatcaatatgcaaacgcagtatataaaacatataaaaactatggtggaaagaaataacaaacaaaataagtggacaagtttattagattccaatatataattgacttttttaattgggagtttcttggacttagtgtgaaattgatatagttatttgaattgataaatatgataggactgttctcattattttttgagaacagtcctattttttagcctataaccttttttgccatattaatcatatcttaataacttttttaattccacgccttcaaacccgtattatacaagcatattcttcagaatattagaatatatattctagtattctgaagaataaatattgttaagaatatatcttcttaacaatataagaatatcatgtatgttgcaattcacaatgcacatttcacaatttacaattacgactaaaattcttgcaatattttcagaattatgatgaataattatttttgcaacatatatatgttacagattgtgttaattcctgggtttcttttttatagagcatattattgaatatctaataacgatatctagaatctcattttcattatgaataaataaaataatatacgtggcaatgcaatagcagatagtattgcaatcgcagtatgtacttttttctcatctcgtaatataaacaagaaaaacttatatcctaaaatgccaattaatccacccaaacaatttagaattatgtcatcaatgtctgatgctccaattccaaagatcccctgaatgatttcaacaaacaaacttactataaatacaaataataaattggttattactcttttattatttttgaataatagcaaatatgcaccaagaggaataaatatagctatatttccacccacattaccaaaagcgaatttttttatagaggcagagctactaaatagatattcctttatactataaaaaggaatgagattgattgacctatgatccaaattagagattcttgataaaaacaatattttaattaataaaagtatgtagcaaatgaaaacaccatataaaaagaatgttttgatccgttctcgtttaatcataattacccccttaaagtagaaaatgaatgctcaaagcttttatctctctaagtattcatttttcacaagattattaatatatatattgcaattcacaatacacaattgcgtcaaaaatccttacaattctttaataattattatgaagaattatttttgcaacatatattttttattctaatttagttcgttatattttaacataatccaatttacttaataactaatttcatttatttgtaataatcatttaagacttctatactcttatatttaaatcttatataagaatttaagttatcatttaaatttaatctctaattgtgtttaatttatgaaggagatactcttttttgttcaatggatcataagttgtttttccagcatccacgtgtgcaacaattcctataattggaccgcctaaaatttgacccaaggcatttatttgtccatttatagaaagtacagtggctctagccttatcgtctatatgtccattaagccatacactaaatataggttcatttatagttctaaaggtatttgtcgctaaatacgccattaacattaatctaaagttttttgtaatagcaaatataaacataaataatatataaaatatatttatacctaccaaaagctttccattattattcttatcatcatcaagtctatttgacataaaatgcataactattgcacttgacaccattcctgcattgcttctgttgtgtagccaaagcccacgcttttttacccagattatgtgctatttcaaatttctcatactcttcttcaacataaattagtccagttcaaagcaaataacctgtttccattaatcattattaatttcatgaaagttgctcattttcagtaaattctcaaatatattacactggtaatataccacatatttatccattaactaacaaaatactttctttacaacaatagaaataagtgctaatattaatgtaacgataataattatcaattaataataattataaattcaagaatataaataataacattattttagataaattaataaataagaccagctaataatagtcaagttaattttaaaaaaaatagtttttggaaaaagagtatggcaaacaaaccgtttcaaaacacgaacggttacagaaattggaataaaattaagcgactttgtttaaagagttattttctaggaacatttgcttatgtattttgggatctctttgctcaaacggagtttgatttcggagaacagcaaaaatgtagtttataattttatgcattatagcgactaaggcgattttaggctttttgcctttaaggtttatttgataataatctaataggactttatttataggaactccattacgattgttacggattgaagctagtgcaacagaatataatgctcttcgaccgattcgagttcctctttttgaaattttattatcatcgcctttaaaattacctgattgattaactgagctatcaataccaaagaaagctacaagatgtttgggcttaagaaaaccatcaatatcacctatttcagctattatagtaatagcagttaattgccctatgccaggaattgaatcaattagttcaatattagctctaatagattcaggaaaagtttcagactgtataaaattgttaattttctgtaacaatatatcaatctctgattgaatagtttttattaatgttatagagctggctattttgacggctaaaccgtctaacggtaagccaattattttagcttcattagcaaccttaaataatttggaatatgtattttccgaccagataatgccctttttagagctatcaaggaaaatcttaattatattttccttaggtgcctctaaaattgattgtggcgttggatattgacttaaaagctcaattgaacttttagatgttgaatctgaaaatatagtattatagccaggaaaaataactcttaaatcagcggataattttttcttaaaagtagagctagtatctgtaagtttgtaatactctcttacaagatttttcagaagaaaaatatcaaggctaagttgttgtgataacttaatgttttgaaattttcctattgttgcaatagataaagcgtcttttttatcatttttcacttttcttatgtcgccatttttgttagacttagtaacgagtggattgataacaaatgtgttatcgaaatatttattaagatagtggaaaagagataaatggtacacgccagtggactccatgaaaattgcagttttcatgttaaactcttcttccactttttttatttcattaactaagtggttgaagccattgagatcatgctttattttaaatgacttcttataaatatcaccattcggtgcgagtattgcagtatatgaaaaatcagctgaaacatcaattcctattacaggactataaaaaaaattagacattgtatatatctccttaaattaaattttagatatagaatagaacttccactctgtcagatagcttataaccttgtttgtgacacgggtaattcccgaagggaaacccaaccagctaaacatagaattctacctgatgaaatgatacgcttttttacgggtataggttctaaaagacctcccaggaggtttacatctatcttctattcaggagtattatactagactatataaaacttggttagattcctttaaggaatttaaataaaaaactatttaagatatgaaatgcatattccctatcggggcgtaggcaaagtaataaattagaatattaaaaataataagaggtgtaatgttcgttagaaagataaatagttttctatcaaatgttacaactagattatacaaggaggtttaagatatgagtgaacaatttcgtacttacgaaacagcttggtgtccaggctgtggtaattttaatatattagaaagtttaaaaagagcgttaactgaattaggaaaggacccttatgaggttttaatggttgcaggaattggccaagccgctaagttgcctcaatatataagtgctaatagtttctgtggtttacatggtagagcaatacctgctgcaattgctgctaaaatggcaaatgataagctaacagttatagtagattctggtgatggtgatacctatggagaaggtggaaatcattttatccataatataagaaggaacactaatataactcattttgttcatgataaccaaatatatggccttacaaaaggtcaagcctctcctacttctggaataggtctagtaactggggctcaaactactggaaatatcaatgccccattaaatcctgtagctttagctataacacttggagcaggctttgttgccagagcctttagtggagatatggatcagcttgtttcaattatgaaggaagcaatttcttataaaggatatgctatggtggatatttttcaaccttgcgtaacttttaatcatattaacactttctccttctataaaaatagagtttattctttagatgaaaattacgaccctagcaataaacttgctgcactagaaaaagcaatggagtttggagataagattccaactggaattctatatagagaagataaggaaagctttagtgaaagaaatgttgttttaaataaaggtacagctcttattgacagacctttcaatccttctattatagaagaacttacttctcagcttgtataatttaatttatagttatgagcattaaagattatttcaacaaacaaacttgatataaaagagcaataataaatttgttattgctcttttatcctttttgaataattacaaatataaccaaaggaaataaaactaatttcacttatttggtctatttaataatttagttttcaaaaaaggaagctgatagcggttgtctttctgtgaatcttttaaagctatgtttaggatatcctaccattacaactcctgttattttctttttctctggaatgttaaaaatcttgtacattggcgaattatcactacgagcacaaatttcaaatactcctgcccaacatgatccaagcccaagagatggagcatataattcaagatacgataatgaaagaactgaattttctctaccattacgaaaatcttcatcagccaaagttataattatactaggtgcatctcttaagatagtgtcaactttagtattcttgtagccactaatcattcctgctaataccttactcaaagtttcattattttcaaaccagttaatgcattcctcaacagctagttgaattgttttcttatcatctactattagatatgatataccttgtgaattacttgcagttggtgccaaatgtgcaacctcaacaagttccaataacttttctctttcaactggtatattcttatatgaacgaatagatcttcgtgatctaataaaattctttgcttcttctggatttagttttttaatttctcctacctcactttgcatagctaatggagatttcttattatctatagcctcttttggacatacagccacacaatgaccacattctatgcatgcattaggattgacttcttttgggccgtccgcttctagttttaatactcctgttggacattccaccacacacattccacattttatacatttttctttacttacagttattaaactcatttttattcactccttattaatttttgcactcgcataataatacgaatacacttaatttttatttgatttataatacatgttaaaaaattttcccagaacttgctttttctcattaatttttcattttaaatcatctccaatactttcctatgaacgcctcacatcttattatcacctcccttagctatgcttagtacccctttgagaacaatcattctaattgatataaaaaaattatatattcaataaatcagaaaaatccactatatcatgcactcttctttattctctaaatttcttatattattgatttgagtagtggttatacttttctactatgtaaaatggctcagcagaacatttttttgagaacgctcattctaattagtataaaaaaattagttatttaataaatccatagaaaaatctgctatacgatgtaatttttctttgctcgctgaaattcttaactgcacacgaattccaagcaatgtattttgaagtatttctgataaaacttctgaatcatacttgcaagaaaattcacctgtttccatgccttttcgaacaagatcagcaagtagttgttctgtttgcatgaatatcttttctattttttcttctatctctttatccctaagagccatctccgttgctgaatttacaattaagcagccccattgtttatcttcatatccttcgattgtaaaattaaaaataaattgtatagcctgttttgctgtttccgcatttgaaattcctgcctgcattttattttttattaattctgcataaaaatctacggtttttaaaaataatgtgtgcttatcaccgaaggtatcatataaacttctgcgatggattcccatgtgctcaactaaatcatttaaagatgtcttttcgtaaccttgcttccaaaatagttccattgctttctgaagaactacattttcatcaaattctctgcttcgtcccatcaagttccctcctttatagaattaatattagcattttgagaacgatcggtcaagaattatttacatacttaatcatatctatattttcgcacattacatgctggaaagaaaagttacctggcacaacacaagagcccctaccctagcctacaattttctgcctaaaacacttcactaaatgagtttatatctaatttctctttttatcttgatcttaatataacgccatccctttgaagccaattcttctgcatatgcttttccaataccagataacgcttctgtaaccaagataacttttcccttttaattaaacattttcttaacctcttaaaacagatcaattatttgcctctattatttccttcaatttaacattttgattaataaatctagctctacttttttcctgtttaagtcgtatagcattctgtggacaatgattaatacaggctaaacactgctcacaatttcctttataaacaggtttagtatctacattaatattatttactgggcaaactttctcacaaactttgcagctattacaggtatcttctacatagaaattcttatcatattgagcgttagccttagtcttagaatgaaaattttttaatattgcttcaatacattttataactgccgaatgtctcttgatatatacttttttaaccttgatatcattgattatttgtgcaaggctttcttctatctttttctttggctctttttttatctctttagccatatcaaacaccggaaggtaattgtcaaccataagtatttcattaatgtatgaaaactggatttgatttctttttccaatttctaaaagctcaggtatgactgctcctgaaaaagatccaaaagacactacggcaaaaatatatttactttttagtttaattttatttagaaactcctcaacaattttaggaactcctccataataactcggaaatacaataccaatcttttcatcttcaaactcaaactgtcctagtttcattaacttaggaatagaataactttctcctccaattctctttgccacatataaattgttgccagttcctgtaaaataaaatattttcataatgcgctcctttcagatgtttcacttgtaactccttatggactatagtataatttgataacataaataattcaagtgaatataggctagctgttacaaaaggaggaatattgtttatgactaataaatacaatgctgaacagaataagattacaaaagagagtattttaggtgctcttatgtctttaatggagaaaaaggacttcaagaatatatctattacagaagtatcacaaaaagctggtgtatcacggatggctttttatcgtaattacagcataatggaagatatccttattgatcatctagacgatatgtttagagagtattcaacccttttaaatcataaagaaataagtaattatgaaatgacacgtttatttttttactattttagacaacatcaaaaatttattgaaaacctactaaggtctaaattaacccacttaatacttgaacgatctattgaatttcttaatatatactcaaaaactataacatgcaccatggattgctctcctgaatttgaaaaatataatattggattcattgcaggcggattttttaatgtattgatgatttggtgcaaaagtggtatgacagagagtgacgagaagatggcagaaattgttcatgataggctttcaaatcatattgctggaatcaccttaacagatttctgattaaatccaagatatatacgaagtatgggaaatggataaaaaagattcgctactgacttaactctaatttaagaatatattaataatgcattattggagtcatcctcccatacaatgtctaaaatattatcatagaaatgcatttacataaaaagttccccactttctagtctgagctgactttagttgatacatttccttaaacataatttctcatttgtttatttcaagaactggatactcctaatttcataaaataactattgaacatcccctaatattttaaagtacttatatgatagccataaacttcttcctaccattgaagcacacccaaatgcgagaattcctatacctataaagctagttatatttccgccaatatatctaaaagccgattttacaacgataaggaaaacatagactccaaggcttaagtacgattcattataataaacctcacctttagcttcatccttactatattttaatgttcttccacgaattattcccactcctataccaataattgaacaaataattattatcataatctctttcaatgaaaaacttaatgtttttgcataatcttcaacaatcattagaataagtagtataggtaacaaccataaattagggaacttaattcttttattctttccattaagtatccttaaaaactttaatactataaaaatcaataaaatataaaccattgacactaattccacctctaaactttattttctattcctcaaaattttctaatataataatacaaacactttggaactatagataataacaatctctcaatatcttatcttttaaagtctaattattaacagtaattgtaaacctaatttttatacctaccttggatacagctgtctctaataatgacacctttactaaccataagaatttcacttagttaagctcgctgtaataaatattataaatttagaatacatatggaattaacgcccatgattcttttatatatttctcatattctttaccaaattctaatactaaaaatctttgttccctatttatttttataatataagtagttaaaataatacaaaatcctatgatagaagctaaacttccaaatgtaagaaaagttccaaaaaagccacatactatccctgtataaatgggatttcttatatatttatatgggccactacgaactaatctttgctcctctactttctgaatggctccactccaatttctacctaatactattctagcccacattgcaaataaaagagagaatattaaaattgcgatacctatatagtcaacatattcataactaggtaatatcctattccataagaatatatttttaaactgaaaaaaggtaatggcataagagactattactaatattaaatgtactattcttggtatgttcctttgaccacttgattctttttttacatttgacctagtttttatcgctgctaatatccagtaaatccaaaatataccccaaatataactaactacagtaatattactcataaagccctcctcatattttattagatttaatcatcacttttaatatatttttctgcaatttctataaacgtatcctttgtcactgaattcatgtcatgtaaaaattttaatatagtagctttctcctcatcattatattgagcgataatatcttttttcttattatatgatttctcatgaattctattatgaatttcacacacatttaatcctaattccgtcaaatcataatatacttctttattattcccttccttttgatacttcgatacatagccttcgtttaataactttttacacattttagttatagcacctgttgtcattcctaattcttgtgatagcttagttatatttgcatcttcgatatattcaatagctgcaatgcaatgaatttgtgaaaaagtaagtttattctttatattaggaacatctatttcattattttcttgtattttctttaatgaaaatataatctcattaataatatccatattaatttcccccttaatatttcttcctcggaagtaatattatattataatattatttcttccatgtcaacaattttcactttaaagacttactcctagattcaattaatcacttgtaatacctaatgaacaaattccactgttaaaaaatataatcattctagactaaatgttgagaatttaattaatcctcccctaatacctgtagttaaaaataacatgtcttaagcaagaactaaaaaaccaccggcttaaccggtggttctgattcttattcactaacattacaatttagaattaaagaactaagatgattgtaatgaaaattgttctaaatacttggataaactttcaatattaaattgcatatgacgatcattaccctcaagtttacttagcattataccaccttctaaggctgaaaaaatgaaagtagcaagggcatcgatgtcaagatttgaccttaattcacagttctgtatcccttgataaagaatttccttaatatattgcaacatcctttcaaggcttttttgggctttttttcgtaactcaggatgagtatcatcactttcaatagccgtgttcaataaaggacatcctccgataaatgggggatgttccgtaacttgttcatataccctaaatatagctagaattttatcaatcgctgactgttgattatccacagcttcggtaaatttttcattaacaattcctactgcgtaatcatatgcctcaagcgcaatctcatccttacatgcaaagtgacgataaatcccccctctcttgattccagttacttcagtaatatcagagagcgaagatcctgcgtaacctcgctggttaaaaagttcagccgatttcttaattatatacttgcgtgtattttctcctttagtcatagtatctatcctccaaggaatgtaattcttcgtaatttcatcctcattgcacatgttatttttttaattattatagcatatctccaaaaatttaaatagttattgcaagccggggtttatttcttggatgaacctgatcttttaatccaaaatgccaattatataattataaataataaaaaatgttctcaacaccagaaatatgaatataaatttgcactttcttaatggttgtgttaacatagtaaaaaagatatcgttcagtatctttttattatattaaaatgaggtgaagaaaatgaacgacacatggtttaaagaacgtaagtatgcttggatcggcttggctgctttgtggattatcggctttattggcgcattattgcgtttcattatggctacttatcaagttcaaatttctcaagatttgaatataagtagaagcttgatttctatggcatggtcaaccaacctactaattgcagcattatgcaccccaataggaggatggattgcggaccgctatggacctaagaaattaatgctactaagtacaatgtttagtatcttagggacaagcatcgtttttgtggggcataattctactttgttttttatcggatatggagtcatatcaggtttttacggtataggagcctctgccacatatattctaatatttgactggtttaagcatcatcgagcaaaagctactgcacttctggcaagctcatcatctattggtctcgccgtttgcactccaatttttatctcgaacacttggttaacatggaaggacgcatttctgatttcttgcctgctcagcctttttgttgcattgccagttattcagtttcttattcggaatcctgaaaatccacagaagaaagcaaaagaatccgaacaaccaaaagtgaaaatacttttcaaagatcctcatatgttattatttctatttattggttttgcattatttacatgtggatttaatatgggtactgtggaaatgaatttagtggctatttatcaattgtctagcgtaaagcctgctttgattgccgtatccatgagtaccttaggaattatggaaataatcggttcctttattttcggatatcttttggatcgtctcaataaatttacagcgatgtcgttgttgtacgggatacgcatcttagcgtttataattctgtttgtacattcgccatggtcgccaattgtgtttgcagttttcttcggatttacttacctaggtgctgtaccaggaggaatgttaattgctaacgagaatacaaaagaaaaaggaaagttcattggaagtctccttctattccatcaagcaggcgggatcattggtagcttaatcggaggtgtttcctttgatatcagtaagagctatcaactactcattggttttgatatgcttctatgcgttttagttaccatagggtattttacgaattattggctacgatacaaaaatactttatatttaagtagatatacaaatgaagttaagaaactacactaaaatgatcaataattaattatcaatatattttaagtttccatctacatgttctaagtaatgagaatttgatcttaatgatttacattttagccaataaaaaaacgccataattttattatcacccaaagatttttctttcctaatctgaagatctgtttttccatcttaaaattatgtaaaaacctaggactttctcaagcaaataatcctcaaacccgcattatacaagcatattcttcagaatattagaatatatattctagtattctgaagaataaatattgttaagaatatatcttcttaataatattttagaattatgtacttagttactaatcatattatttttatctaatccattctttacaagaatagaatataacgcaccatctgctttcatatcattaattgctttatttaatgcgtttaataagaaaacatcatcttttttaactgctattcccattactccttgtaactcaggagtatagccttttaactgccttagcaaaggatctttttcctttatatagtagtttataataatagaatcagctaagcccgcatcaattttcccactacttatagcattaaataaatcagttgtactatccaaacttaatgcatcttttattaagttatttttcttccactttttcgctagatcttcaaatattgttcctttttctactccaattactgcattttttaaatcactcataaaattaatttttgaaaatcttggtacaataacagtttctgattctttatacaatggcttagtaaacgctactagtttttcactttcaggagttataaatattccaccaactgctatatctatgctatcatcggcattaaatttatttaacaaatctgcaaatgttacttccttaatttcaaccttattaattccaagccgccgtgtaatttcagttatgacatccgcatcaattccactcatcttatttgtttcggcatttatccaaaagaatggaatttcctttgatggtgcagcaatagttattattcctttttcttttatcatttccaatctatctttttctattgagctatttgccattatagtttccctaggcgctatcataaatccaattattattccaataatatttataataacaattgaagtaaatatttttttcataaataaaaatctcctttaaaacgataaacatatctttaaattattatttggaatttaaatttaaattatccacatttgaaaaaattcaaacttttaaaaataatactttaccttttatgttagcctttaaagcgagatcaatgatcagtttactttaccattgagtagtatccatcacatattattcaacttccaaagagcatgtattttatttactacgtcaaatctacatataaaatgcaacttttcaaataaaaaattggagagatcgcaacttcactcagaatattgcgacctctcccaattttatatttagttttttcttaatagctgattttttttgctcataagttttgaattaaattctaaatttcttttatatgaataatagcaaaaactcatccccaaaaactctgcagttattaaaatagatattagctctataattgaagcaatttttttatatacaaaatagtagtaaatagatggtaagcaggaaatcccccctattactataaatacacaaacaaaagctagtaatgcacttttttgttttattccaaccagataaataaaaacagatctagaaatagtaccaataactcctccaataatagaaaacataattaattcttctataattcctacatttatatttttaacaatcatctgagtcataccaacaactataccacatagcatggatataataagattaaataaaaaatcctttaaattctgtttcatgatttacgcacctcacaatccgagatattgcttaaagttatttagatattttcttgtgacatatacttcttcatccatatctatgagctttaatataagcttgctgttaaaccatgaaattattctatctactttcactatatttacaacaaagcatttacttactcttatgaaaccttttgcttccaatctttcttcaagttcataaagcttttcttttactttatactttttatccttggtcatgcaaaaaacctcatttcccatagcttcgaaataatatatctcattataatttaatactttaagctcatcctcatcacatcttcctgtgattatatttttagcttcttctttgctgcctgaaatagaatctaaataaccaatcaaaatatttatggtttctatatcaaagtatacccctattttgccgctctttaaatcaaatcctttttcgattaaacatacatcagcattttcattaatctttattttgcgatttgtaaggatttcttccagcattctttttagattttcgctgcaaattaaatctaactccatgtaatttccccttttgctttaaactttaagcaatgcctttctgacaaggatatattaaaaacttaaactctatcctctcgaggatgttcaaaaaaataacaaatcagtatgctagtctattttgtgctataattcgcctataaatctcactaatagcctgcaactttagctccttgtctaacacaaaatatacaccttaaaaatagcagttatgctgcatataagaacttctcattgcatcttttacttgttattttccttcacatcccctactttaaacttcaggcaatacccctggaattataattgatagcataattcctaaaatcaccagcccattcataattataacagtcataatattatgccctgataattctataatagcattaattaaataaattacagcccatatttttgttattactatattaacttctataaataaagaagattttccaaattccttttcatatcctcttctagcatcatacattgtataaggtcttcccatcataatagaaatgaaacccgttaaagctaatactgtatatgaagttaaatatttatattccataatggaattaattcctaaatagaaatataatatattagaaatagtaaaataagctactaatactatcgacatgattcctatatttttattaattatatctcttataaaaagcatcagtatagaagcaaatcccaaaacaaggcataaattactcgaaatactccaaaagagcattagtggcagaaaacttaatgttacattgagaaacgcttttgaactactacccattatttttccctctatctttctcaagtgcctttttatgacctgtgatcatgaaatcaaccatatttttctgtacatgctccttgaatttttttcttttcataagatatctcataactttcccttgagctttttcttttaaaggaacttttttaattagcctatttttcttatagtatttataatcttctaagaaaatagctcctagccctccttctattgcatctgcgaatagtttacttccagctatatttaaaaatgtttcaggcttaaaatagtttctttcagaataatttatactcattttagcaaaagcatatatttgattgtctataagagagttatcttcagcttcatcagtgacaaatccaattaaattgcctccttgtgtatgaaactctaatatctgtcttaaattttgatcttcacttaatttccctgaaattatatatcctatgtgtttacctctgaatataggaacatggttatatcgaaaacttctatcataaataagcttaaaacgtgaagataaatatctatcctttatacttcctgcaaaaattatgatatctgcattattaatgatatggtctaaaaactccctataaccatctttaccatcataaacacatttattttcagctccacatttacagcaaccaagacatgccccttttatatcaacctcattaagattaaggatctctacagaaccttttacaaagcttttatatttgtcaatcatctcattaagattattatcttctttagcagcgtctgtaattatgattatttttttatttgtatcaataactttgtctgtcgctcctgcactatattcaaagttacttttacttactgaattatacaatttactagttgttaaaccttcatttgcaaaatcaagtaaattttcaaaaaacactttaagctcttttcttctattttccttagttaaatcctgcatctcgtgagataaatattccacatagttcatgcctaaatcttcagaaattgccctgatataattatgtgcatgaatatctgcataatgaatagacgtagaaaatgcagcagtatacttatccttaaaatagctttctaatttcttttcaaatataagttcaataaatctcttataattagaatgcactaaagcatgatatagcggaaatgcccatataactgcatctgcttcctgaaccattgtgcataaagcttttaatttttcagtatctttttcataactttttacttccttaacaatatggatatactgaaattcatgtttttcataattttgttccaaatacttcattgattgcattgtaacacttttctcaaacttcggactcccatttaaaacaactattttcataaccaatacctccgcttctttatattttcattctattagaaaacatgaattaaaaccatagattttgcttaagatgcaatttaaataaaataagatgcattaatgatctgcaaaaattaagagaacctcctctatatggatttggttctcctctgatacttaaattaataatatactaaatcaatttgtgtatctcttcaaataatatctgaattcctaactttatcttgtcttttgtaagtttagatatgcacaatctaaaacagcttattcttgaactattatctataaaaaacgcctttccctctgctatataaatcattttttcatttaatcttttatttagcgtttccatatcaatatgcttagtaaactgcatccatataaaaaatcctgtatctggaataaatagttccacgccctctgtatttatgttttttaagcagtcctttaaataattcatttttttcatatatgcaaattggattctttgaatatgctttttatacattccactattaatataaatttctaaagctccttgttctaatgctgatgtactcaaatcataatatctcttatgtttcaaaaattcactttttaatttttcttgaagtactactgccctagccttatccctggcataaatgttttagaaaagctttttaaatatataacccgttcccatatatcataataataaattggtaatgattttttgtttttatctaaatcagctaaataatcatcttcaacaatgtaaacatcatatttttcagctaactctgcaatacatctcttatctttttccgaataacttgtccctaaagggttatgtaatcttgggattgtatagaaaaactttatatcttgatttttaaatatattctctagttgttccaaatttatgccattaaaatctctgtttattcctattaatctttctccattaatctctaccaatttgtgtatcaaactatatgttggctgctcaactaaaatattctttttcccatttggaaaagacatttttgaaagaatgcttattgcctgttgtgaacctgatgtaatacatattttgtccatggaggtgaatatttgatattcagaaaagaagttaaccaatgatgctcttaaagatttaaatccttcagtatcaccatatataaacaagtcattcttatataactcaaccgctctatttatacaatgattaaattccttatacggaagtaatctggaatcaggcactactaaagaaaaatcaataatgtcattttcagcattctcttcagaattattttccacaaggtaatatccactcttaggaatagagtatattctatgattcatttcaagttctttataacctcttattattgtggatttattacatccaaacttatcaaccaaagttcttattggaggtaacctttgcccttgctttaactcatttctttctgcaagttcttcaatatattgtatgataattttatatttctttttcataatcgtatccttctatttatcttaatttctcaagcatcttaacacttttataccggtacaaaatacttttttaaagattgtactgtatactctaaattcttataattccattatatagttaatgaataataaattgtaaattaattactcatttaatttcaatatacactatttaatctatgttttaataaaattacaacaaacataaaggagttaagtatggaaaagtatcaaaaaaaagcaatattatatcttgtaattgcatcaattttatggagtattggaggcctatttattaaattagtaaattggaatcctattgctattgctggagcgcgtagcggtatagcagcaatagttatgttattatacttaaaaaagccagcaatacacttaggaaagacaaagctgctaggtgcatgcacgtattcatcccttctcatattttttgttactgctaataaactcacaacatcggcaaacgctatacttctacagtttacagcgcctatatgggtattattattttcaaaagttttcctaaaggaaaaaattaaaaaatctgatttagccgtaattatttttgtcatacttggaatgattttattctttataggggatttaggacttggcaatattataggaaattttattgcaatactcagcggtatttcaatggctggaactgttatatttctaaaacttataaaagatgggtctcctgttgaaatgactttcctgggaaatataattacatttattatatctataccttttttctttcaatcagttccaaacttaaatagtattttgggattattaatcttaggaatattccaattaggaatttcttatatattttatacattagctgttaagcagatttctcctattgaagcaatcctaattcctgtattagaaccactgctcaatcccttttgggtatttttattcactggtgaaatacccggaacttatgcctttataggaggattaattgtacttacagctatatgtgttagagaattatgtataaaaaaatagtactttatgctcttatacataattctacttacatttacctcctcaattagttgctgatagaataagaaaatttgaagacaacagttaaactatttataaactagaatttttcttattaagatgtataattgatgtagttttaagataagctctaaatcactaaacaaaaaatagtcatatcaatgagtctttagctagcagtaacttctgcaaagtcatgtactaagggctttgatacgactattttttcttaattttcatatatgaagaatttacaatcaaaaatagttcaattagaattatgacattgataattttgccatggttttttataaagaactaatattataatcgttgtttacatacattttaatataccactttttcaacttacaactataatgctcccatatctctagcaatataaagagaaggatatttagcattgaaatttagttcgcttttaatacgcgctgtatctaatatcatatcccattggttaaaacttggccaaccaccatttggaggtacctgctctggttcaccttgtagcttataaaattcacctacagtaatagggttatcatcagcaacattatatatacgccccccaataccaggtgtactaacagcaagcagtaatgcttgactgacatcttggtgatgcactactgacatcgcttttgaagggttccagttacttagaaacggtaaaatttcttgaatgtgtgggtcattatcaccataaacaaatcctagtctcataatacgaatatctagtccttgttcatgatataattcaagtagagctttttctgcacccatttttgttttaggatataatgccgttgctgtaagaacatcatcttccatacatggtctatttactagagaattgttatatacattgcctgtgcttgtaaaaacaaatcttgtgacacctgcatctaatgctgctttagcgagtgtaatagttgcatctatattgatagctttagccatttcttcactaatatcacctcgaaattgagctgctatatgtacaacagcatcaacacctcgtacggcttcaattagattttcattatctaaaagatctcctaatactacttctgccccctgttcttttaaagtggatgcaccttctaagtttcttacaagaatacgaacctcatgacctttcttaagtaaatacgatacaaatcgacttccaaccttacctgttgcccctgttacaaatattttcataaattaattcactccaatctaaatagttttgtttatcagttatttttatgttatattgctaatatatcagagttaaaataattcaaccacattgtggttatcctacgattgagagtagtaggataagaggaggaaaataaatgaaagaaattacattacagcagtcgttaggtgaatttttgcgtgcaattagagaacgcattacgccagagcaggttggattaccctcacatggacgccgccgtacacctggacttcgtcgtgaagaagtcgctcagcttgccaatgtaggaatttcttggtacacatctatagagcaaggtaaagacgtacatccttcttatcaaatattagaaagtttagctaatgccttaagattgtccgaagatgaacgccgatatctgtttttattatctaaatctgatgaaatggaagaatcaaaaatttataaagaaattagtacaggattagaaagaactgttttcgcattggagcctaatcctgcatatataatggataaatactgggatgtactattatggaatcgtgcagcagaatttttatttaaatttccttcatattctaccagcatagattcaaaaccaaatatattacatcaatttttatttgatccattcaaaaaggaaatcaactcagattgggaagaacgtgctaaaatcatgattgcaagatttagagcagattgtgctaggtatcctcaggatgcaagattaaatgaaatgattgagaaatttaagcaagaaagtgaattcttcagcaaatggtggcctcgttatgaagttaaaactgtcactgactgtcataaattatggaatcaccctgagattggagatttggaatttgaacatgtgaatttgcaagtatcaaactgtcctgattttaaattgatgatttacactgcttcaccttctacattagaaaagcttaaacaaaaaatatattctatcaaatgaataatacatcataattgacagcccaatcataaaagatactttacattatcaatttactgtgtagatcattttcgcacatttccttaataaatacgcaaaagccactttccttctgcgtatttatttacctttcattttaaactttaagtctataacctgcgcccctactgtttaaatatgtgcaggattagaatatgagaattcaattgaaaaatacatattataaattattaaaggtaactaaatctaatttagattcagctacctttttaatttatctataatttaaaaataaattttacttagtagtatcaaacataattttttaaactaccaaacctcttcttttggcatatagcctaaaagctacttcttcaacaaatgagaataaacttgtggttataaaatatattcctaaagcaataggagctttaaaagtaaccaatccacttattatagttgttattatgatgttggttttgcttagtttagcttgagcttttaatctaagaaaaggtatataaggtaatatattgggactaagcattgaaactgcatatattgcaggcactataaataaactatctgacatcttcaagctaactacccaaggtataagcgcagttccaacctgcataggcatatttaaaatcactctatacaaattaaaaactataggtatctgaagtaaacttgataaaatacctatcattccccttgcattttgcttaaagtacttttgagtctcaatttctagcttttccttattacttttatatttctcttttatttcttcaagccccttagaaaactcctgctgactatacatgcttaacttttgcttaaatgatattggcataagaattagcttaaccaatatagttaatagtataattgctattcctaagtctcctgtaatattaaaaaaataattaagtgatacgtttagtaaatttgaaatgatgttcatattcttcctcctaaaatttaaaataaataaaaaacaccatttcatttaaaactgtacacaataccgccaaatatcatatttttcatatgatatataatcatttattatcataaatcttgaataatccaagtatttaatataaatcctacttacaacattataatttaacttttttctatattttcttaaatatgtaattgtgcaagtaataatacttataagaaacactagaacaaaaaacaaatgcatagtattcattaactctgctctcataaaattacctcacgaaattctatatatgcatatagtatatcactttagaatttatttacaatgatcctagttcatatataatattaggttatacatttcatagctccaactattgccaatatattctactatataaaatcggataattatggtacaatatccaagtaaaatttaacaaccatagatggatggctgtggaggttttgaacattttttcctccttgggctattggtgaattatttcgctgtagctgagggggtggtattggatatgctagaattgattataaaatgttttgctgctctttatattattagattagttttaaaacataatctttttatttctaaattgataattaagattaattttcttggaattcacatagaaattaatagcaaagagaaaaagcacccatccgaccaagaatagtgctttagtctcttcataaatttgtaatttaggtccaatagccctaaaacaaaataaatgttttaatgattagcttggtgttgacgcactaagcttttcttatttatattatatcaaattcttttagaaaaatacatatagaattgatattttagatcgtaacttaccatataacttcttaaaataaaaatttcactttgagtcaaccctacatacatttttaaaatgcattattttacttcccataaaactttataagctgttaatgccatctctttatttaactggtaatcttacttcaaaaacagttcttttattatcactataggcttttatcgttccttcatgcaactctataatattctttgtgatagctagccctaacccagaaccacctatatcactatttcttgatttttctactctatagaatctatcaaatatgtatggcaaatctattgctgatatcgattgaccatagtttataacttgaactactgccatattctcttccatttttgttgttacatcaacataaaaaccatctcttccatacttaattgcattggacatcaaattttcaaatgctctaactagttttcctgcgtctgcatttacaattaacttatcctcagaaaagttgattcttgattgcatttctgcatttttaaattgatattcgaaatacgcaactacctgacctaataattctactaaattaatatcaaccttatctaaattaatggtgttattttgcattttagtgagctcaaataagtcattaataagcaaattcaatgcttttgctttttcaaatgctatattagcataatatcttagtcttacttcatctttatacttatcagcatcaattatttccaaataacctattatagacgttaatggagtccttaaatcatgagaaacattagttatcaagtcatttttagtttgttgagcttttctttctactattgttatctctttaagctgccttgagatattattaatattttctgctaaattcctaatatcattttctccatcaacttctattaatctgtccaaatcaccactcgccatcatttcagtttgatctataatagctaccaaacttttagtttttctataagtaatgagtaaatatactcctacaaataatgaaattccagtaatcacataggttgcaccttcaaacattacagagtcaatgagtcttcgaaatttaaaaatataattaatgagttgaattttagtatttaaatataaatatattaatattctactaactaccattaaacttatataagttaataataacgtagttacaatctcacctaatggtgacagccaatatttatagaatcttttatttctcaattttatatccaactccccatatagtatgaattatcttatttccttccatatgatgttctattttatcccttaatctgctcatatgtaccataacagtattattagattgataatatctttccttccataccttttcaaaaatttcctccgcgctaaaaactattcctctatttgtagctaacagatataatatttcaaactctctagccgttaaatctacttctttatcatctatagtcaccttatgcttactcttatctataaccattgattcaattcttattagatcctctgagacttgcatttttaaatttaaaaaatatgatcttctcattaatgccttaactctaactataagttccaattggttaaaaggtttgcatacataatcatctgcaccagtcataatcccttgaatcttatccatatcttctgattttgcacttagcataagaattggtatgttatacttttcccttacccttctgcaaacctccagaccatccatgtggggcatcattatatctaaaactatcaaatgaatttcttccttctccaaaatatctaaggcttcctctccacaacttgccttaaatacattgtatccttcatttctaagatttatttctagcaaatttcttatttctttttcatcatctactacaagaatattattcatttattcctccatttttataattatttttgtaagtattcctctaatgtaattccattatcatgaatatacttagcagcttccttacctacatatctaatatgccatggttcatattcaattcctgttacacttttctttccataaggatatcttataataaaaccaaatctatagcaattttttgcaagccaatctgcctccttagttccctttgcaaaatatccatttttattagtgatatcaatgcacagccctgtttgatgttcactgaatccaggtttagctacatatgcatctgcaagcttttttccttgagatatcacacgattttcataaatatcttcttgtgacttataagatctataacccgaattaccaagtaatattatcccgtcttttttagccgcatttactaattcttctaatggctttacaacagttcctgctacgtgtttttcttcatcatctgatccatttgaaaatggtatgttaggtatgcttaatccttctggtacataatttccacttaatccatgcttctcatttactaatagtattttttcgcttccattagctgtgtttacttcaaacaacttgtctttatcatttgaaccataattacttgtatttccttcaatataccaaaatccgcaaattattatcatcgtcattattataaatcctgatatctttttatatacttttctcatatcttctacttcctttcaaatgtcataatttcattgtagaagatagactttacaagaattataaataaaccttacgaaatcttaagttttaaaaaacttaccttgactaaaaaaaatgccaatactattcgaatagcattagcattttttatcatatacaaatttaacagaatataagatacccaattttacttacataatataattttttgtgtaattgtatctaatttaaatgaacaattatactattaaattaatttttatattagttccttcattttaattccataaaatttttttattaaaatacaattttcaatgttaaaatatcttctttaatttctgctaatgctttagcatttattctttcagctaatagcttcacaattgaaaggcctaaacctgtactgccagaacttcttgatttatcccctgtataaaacttttcaaataataaatttacatctatttttttaggatcttcaattttattggcaaagcaaagctcaacatgttcctttttcacaagtgatattttgacataacttgaaccgtatttcaatatatttgatattaagttttgaacaatacgctgtagaattattttatctccttcaataaatattgttgtatttggcaaatcaaaaatgggctcaattccagcttctttaaatggcattatattttggagcattgcatctgaaagaaaattattcatattaattttttctaaatttatatgcattctatcattttcaataatagttatttcaaaaaaactagtaataagattatgtaaaatctcagatttcctttttataatatttatcttttctctttggtcttctgataatttacttttttctaacaattgtagataaccaattatagaagtaagaggggttcttaaatcatgagatatattcgcgatagaatccttaagcttttgctcatttctcaacatctctattcttagctgcttttgagaatttatatttctattaatgttacctgcaaggtattcaatatctttatcaagtaaagatatatctatcttcttttctgttttgccttctgaaatattttctaattgttttcctatactttttatttgaagctttaaatgaaatatataagaaattaataaaataattacaatactcaatattaatatgattatcattatatccatccctacacattaagtttattttagttcacatttacgaaatatattataacttaacattagtataaaccctaataaaattataccttctaaagaaaatgatataaattcaaatgttgagttattgtttaagatcactctaagcaaattcattggatgcctatataatggcaaattcatacttctggcaacaaataaatatatagcattcataagaattgtaataactgatactataatagtttttaaattatccctaaatattactccaaaaagtattattacagaaaaaatagataaatataataatgttgtacaaattaaaattttcattagtgtaattacatttactccacttggtgcattaaagccatactttatagtaacagcgaatgcaccagaaaaagaataaataagtattgctacagttgtaataataagtattgaggcagcttttgtaaaaaaaacaatgcctctactatttccagatgcaactttagtaattaaagtcctatttgaaaaactttttcctattagcaatgctggaaaagctgaaattaacatgcaggttcctggagcatcatggagcattgctattaatgcttcatatcctcccaaagttaaattataataattatcttctaaatttccataacctgaatatactccataaacaatcgcaattcctatcataagcaaataaatattgttatgggtagcctcgtaaatttccatctttaataattttttcatttattacactcccttttatcgtaactctgcttttttaaataaaaaatatgatatgctcaagaaaaataatattatgcaaataccaattagtactgcgtctttaaattgatttggaattaaaggcctatacaagataaggcgtgcctgtgctaatggtagatacctaaatatagttgttcttatatcatttgttgaatttaataaagagatatttataaagtatattccaactgaaattcctactgttttaccaatatctctaaacataaaagctataaatatacttacacttgacatagccatccccaataatgatgttgttattattgttttagctaaaatatttccctcgttcataaaatataccgtagtatatctatgtaaaataatattaagaattacatttacaattgggctaaacaaaataactaaattgactccaatgaaatatgctgacaccttgcaaataaatatttgaaacctgctatgacctgcacacaccccattatttatagtcctatctccaaaatcatttccaaaagaaattgctccaagtaatattggaaacaccattaataaacatgcataataaaagcttacccctatattttcatatccagttataaatgtatgactatctgaagtcatagtaattccaaaaagtgtactcatgataaacactaaccaaaagcttttacttatgaataatttataaacctcagtcctaaaaagattaatcacatttacctcctccaattcttctaataaagtaatcttcaaggctatctcctgctaaagaaattccggttattattaaattatttctcgataatgctattgaaacagatttaatatcatctaaacaatcatataaacgaattgttttgtctggcattatttgatagttatttgtatgaagctcttcttctaatatagtcgctgcaatagatacatcatctacattaatcgcaatatgctttttacacttttcattaagttcttcttgagttaatgattccaatatctttccattagaaataataatataatgatcagcagtttgataaagttcctctaaaatatggcttgagattaaaatagtcattcctttttctttgtttaatcttttaataagttctcttatttcaacaattcccacaggatcaagtccatttacaggttcatctaaaatcaaaaactctggatcattaattaatgcaagggcaattcctaatcgctgtttcattcctaaagaaaaatcctttgctttcttttttcctgtatcttttaatccaactaattctaaagtatcttcaataacctttttatcaggaattcctctttgaatgcgttgaatctctaaattttgatatgctgtcatattaggatataatgcaggagtttctaccatgcaacctattcgctttctttgttcttgtaatttcttttctccagtttgtccaaataaataaagttcaccagatgtaggaaatgataagccagtaataagtcttattaaagttgtttttcccgcaccattttgtccaacaaaaccataaatattacctttttctaattttatatctacaccatctaatgcttgtgtatttttatatttctttgttaagtttttagtttctaaaacataagtcataattacatctcctttgcttttccatatttacattgtaaaaatcgtacttaaagaaaatcttaaatcaattctaaagaaaaccttaaatattttctccataacaaaaaagcaggctttactcctgcttatatatttctttttatttattattttaacttataacccattccccatatagtttctatatattcttcattggcatttgcgcttttaagcttatttctaatattgcttatatggacatttagtgtattatcttcactaaaatattcttcattccatatactttcaaataaatttgcctttgaaaagactttttgcggatgacttaataataaaaataaaataccatattcctttgaagttaatacaagtgtatttccgtttactattactttcttttcctcttcatataatgtaatatctttataagttaaaattgatttttttatatttaaatctgagctacagcgccttaaattactctctactctcgctaatatttcatttaaatcaaaaggcttggtcacataatcatcggcacctaaacgtaataaatctacctttgtatgtaccatatcctttgcagataatacgatgacaggtatattagaaaagctgcgcagttcccgcaaaatctcatctccacttttatatggtagcattaaatctaaaataactaaatcatacgttaaagttcttaattctctcataccatctattccagtattagatatctttatttcatatccactttcctttaaaaattccctaagtagattgcaaatttctaaatcatcttctataattgaaatcctttgttgcatatcatcaccaaccaaattactacttatttaactaaacctgtataataaattcaattataaacacaatattatcattcttttaatattgtttcaaatccatattggtttaaaatagtcaatttaccaaacgcttaattgttatcttttatttagataacactaatattacatgggaaaatcttatggataactataaaatcatcaaatgttttatcacaataaacaattactatccaactggtagaccagcatatttcctaaatctactagtttgataataaagcgaatgaaactagtttcctttaatatggaaaaaagagaatcacctcattctgagtttgattctctttaattattttaatttttaagttgtaatttgtgtatagatagctaatttaagaattcaacttattaaattaacatatttacaaaattgctagaactttaagcttatatcttaactagaaatcataaatatatttgtgtagaaaacatttgaaaatgagctgttaaaggttcttagctgtaggttgttccgttttagcttgtgaagtgagggtccaaaattttattttgggttctcgaacttcctcagcgaatgtaatgagtcgagcttccctaggaaagttggagcatgctaaagtgggtacaacctattgcttagaaccttcagcgatattttcatagcttttcggaatcaaaatatttatgatttggtaagtagactagggaatcacttccctaacccctctcagaaccgtacgtgcggatttcccgcatacggctccccacattataattcacagtatatatgatatatcttcttttaagttgaaaatattaacatatattttagctttaggtattttgaagcactcaaacatagtgtcaaaacttctccagttataacttcttttctgacttcttttgtttagccatttaaaagttagttttcttactaaatatctgaaagttgcgagacttaaactgttgtcagtgattccgtaatacctataatatcctattagtctctgtgtcagtttctccattaataatgtgagcggcactgttctattattctttaaccattcattcaatctctttatgctagctccaaatttctttgagctagtcttcctcttaactctaaaacttccattctttctgcaactgcagaagtgtgtaaatcctagaaaatcaaaagttctatctttatatgattctaactttcatgctctcttgaattttctatcatagtaggcattcttaccgaaatataatattttagttttatcttcagctacctgcaagttaaatttgtctaatctgtttttcaatgcttcatagaaagctttcgcttcgtcttcatactgaaaacagcaaacaaaatcatccgcatagcgtactatgtacgcctgtcctttacacttctttttgataaagttattaaaccatatatctaaaacataatgtaaataaatgtttgctaatgttggagatattattcccccttgtggagttccttcatatactttataaaactttccgttttccattattccagttttcaaaaatctacctatatatctaagtaagttcttgtctgcaatcctgtgttcaagaaatttcatcaaccacttgtggtcaacattatcaaagaatcctttaatatcagcatctacaacataattcacattcttttcagataaatatacatttaagattttaagagcatcatgacaacttctattttgtctaaacccaaaagaactatcaatgaaatcttgttcatatattgattttaatattttattaatggctaattgtacaactttgtcttcatatgccggtatacctagaggtcttttcttgtttgaaccagacttatctatgtatactctccttacaggctgcggtctatatttaaaagtcttcattctaattagtagattatcaatattattctctaagttagtttcatattcttcctttgttaccttatccactcctgtagccttatttccgctcagttcataatggcataaaattagcatttccttgttaactaaatgcattagtgatgtaaatttctctttaggattatttccagctatttctgctatcctctcaagttttgtgtacatttttttttcctcctctgtgtgagaatttctgtttctcttttcaaggtctataatatgttacacccttccctccatggtcattactcatttcttcagtactatggtgtaatccgactactcattatcatttgaatacctctgatttctaatcattgttttccatactctgaagtcagagaataatgagtcctcccaagttgacgtactatatcaatgtataccatgctacaccttaaaaccacgagaaagcacagatattcttgcaataatgattatctatgttctgacttctaatttaccgatattatcgtcctttctgactttgtgataatttcgtggctagtagtttcagcattcgcttgcggcctggtaccttgtttgtctacacttaacttattacatcgccataataagcccaagactaactaatgactggttgctggcctttgtcatgcaggattcccacctgctatatagtaataatgaggaaggttagccctcattatcttttacgcccttgcttggcgtaccggtaagttatcacataaatctagatttaaagttgaatatctatatttacattgtgccttatactaaacttgaaacttctgtatcatttcatttaaatcctgagcaagacgtgtctgctcttgagccgtttttgctatctcatctgttgctctattaacttcatcaatattgtttactatttcatcagtttcttgtgaagatttttgtgccgtatcagccatgctctccaccgctttagtaacctgttccattgtaattgaaatttctttagtcatttcagctatttcatttgacattttacttacaaattctgcatccttataattttcttttccaatttcaatcatatcttcaaacttaggatttactctttccttcataaaagttagtacctcgtcactattgttggaaagatttctaaatgcattttgaactttgaagattgtactttttatagattctacggcatctgaacattgttctgcaagccttcttacttcttcagcaactactgagaatccttttccatgttcgccagcccttgccgcctctatagctgcatttagtgctaatagatttgtctgctctgatatctctgcaatagtgtccgccataacttttatattttctactacttgtccttcttttattgcttgaagtattttttcttctttttcactaaacaatatttctatttctctaatggattccaaagatctattttgcatatcttctactctagtttttgcagcacttgcattataacttccttctactgccttatttgttaatacattaatacttgcctcaacttcttctactgaagcatttatttcttctgccgctgaactagtttcttgaataccaaaattaatattaccaattccggaattaatattttgagacattgctgaaaattcttcaactgtagcaaataattcttcactcgctgcactcatatcttgtgaattgttcattattttcttaattagatttattaaatcctgcctcatatgctcaattcctctggacatatctccaatttcatctttgcgttttaaatctttttctaatgtcttttcagtaaaattaccttctgataagtgtttaaagtgagtcactgcacttgctaatggttttgatacctttttatctatgtataaatatattgctatcccaaccaagattaacactataatagaagatataatattatttataacaaattttcttataaacagctgactttcagccttgcttttacctgtaaatataactccaactgtctcattgttatctccagtaattggtgaatagtatgcatcaaatttacttcctaaaatattagcctctcctgaatatgcattattactcaaaacaacttttgcaattttttcatcaagtttagttccaacaaccctttcgccatctttcattatacttgttgcaattcttacatctcccataaaaatagtagcatcgcacccaaatttacttttaacataatctactagattattagaatctaatctataccctacagacacaactccaataatatctccattttcgttctttactggcgcacctgctctagctgcaagtttaatttgagttccactttcaacttgagagtttaatttaccagcaagagcatttcttatatttgcctgatttaaaatactatctccctttttatcttgttcataagatcttacaattacattacctttttcatcagttattgtaacaaattctacatctagatcttttaatatatcttttaaatcattaaaaatctcctgactatctttattctcaattccctttattattctaggatttaaggccaattgacttccaatacttaaagactcatttttcaattccttaattttttcgcttattgtttcattagcattcattacttccgtcttattgttacgatctgaataagaattaaagctaattgtactgataactatatttgcactaaacagtaaaattgttagtccaaaaataaatagaatcaatttgaactttattgaatttaatttcatacttatctccctcctaccctctaaaaaattttaaccttctctaggtgttaaatcatattaactctatattccttgatttcgtcattaattatcaaattccttttttatttcctttccaaatatatatttgtaagtaatattatcccataatctatttataaatttgattttattataaatttattgagaataaaaaaagtcccaaaccaaattaaactgtccttgacaaagggtacattttaaataggtttgagatttttataataaatttataagatatttatctagctttgtacactaatgcttaatgttcttacttatgagttccataaaagtttcaggtggaacgactcttacgcttttgttttcttttagcatcttcgtaactttctccacgttacttgtctcttttgtccatacgtgcacatagacaaaggagtatgcttctggactatggatatttgtttgtcctaaactaactctatcatttatcctttttactaactcttcttcgtcttcaagtgaattccaaagtagatctctgcaagacactaaaggtttattattagaccataaaatttctcctttataattatcgtgtctatgatagtcaagataaaataaacctttgatatttgattttttagtaaactcattccaaagctcaatatcatgaaacgcagaatcatctattattgatacgtaattttcatttactctttccatgtaattatttaataagtcaacatatgaacctaacttattacgaggaaatttgcttggatatatgtatccatttccagaaggagctactatgaaattattccttggatcctcattgcttatgcttttgttatataaatcaaatacagtaggacttaaataatataatgctggagtcatagaccaacctaaagaaagtttgtctctattttcatacccaaaccacttagacgaaccataattagttccaaggttccactgctgattgtctccatctgacattataaaagtaacataatgaacattttcttctttaggaacttttaatgaagagtttttattaatatgaggttctttgaaagcactcaatgtagttaaattataggaccaatctgctgcaaccatgcttacaccatattttgaagctgtactcacgttaataaactcatctggaccccagcccaaacatgtagcgttatcatccacagaagaaaatattttatctctaagagctgttttatctacacttccttcataaaatattaaagatttagtcattatggcatagtcccttaatgcatcaattctatcaggagaaagctccattaccatggaatgatttagtcctttattccacaaattatcataggcccaattttcatctgtacttctgcaatctcctttactttctataccaagttcttttattttaggttccagcttttcatcaataactatagcgtttttaatgcctgctaaggaacaagcattgtttattgaaggatctttagtttcaccattataaagtacgtacccttttatatagtctttatatatttttagtagctcccaaggatctgatatcatttcataaggtacattatgattactttttaaatcttccaaccatattttataatcaggctgagaagaattaagtgtatatatttgaaaagaacaatgattattaactagcccctgaaggctagttatcattgttctttcaccaggtgtcatagaatctaaagaaatcgcatataaagatttaggaactatattatttttcatataaacagaatttacatttgatacctggatagcattagatttatctgtttcatctatactagaagctttactattccactcactccatttagtatcaaatgagtctccattagctttgcaataatcataaaatttatttaagaatcccattctttcattattataaaatgacttcaatgtagtatcctcaaaatttgctaatgccaattgtcttttaattataccatcagcattgacatctttataattattaatcatgtcatacattatcatgaaagtagatgttcttcctatgccttctttgcaatgaaagtgaagccaagaatcttttggtttattttttatgaattccataaaataatcaaccatatcatcagtaggtattccaccatctctaactgttactctttcatatcctaaattttttgatttagtaagttcttcttcgctttgaactgttttaacatccatggtttgtttagagttattataaaaagttataggttcatttaatttgatactttttaaatcctctttttctttagctataacttgatctcttgtgagtcctacattagcattatttcttgcatctgcccagctaactgcaaatccatttatgaatccatgacattcctgtcttaaatctattactgtcataggcagagaagtatcaattgcctttgttaaaagatctatattattccctgaaaattgttgactgccagaaatattcagcttatctaaccccttaagatccaaatctttattgtcctttacaactgctaaatcagtagtttttcggaagtgctttggtaaaacactattataattaactgagtctaaaattagatgtactccattatccttgtccgacggtacctgagctattgcattgttgttcactgcaaatgagaaaatgctgactatcagcatcgttaagattgtaatccttttaaaatttttattcatattgttcctcctatttttagataatcattagttataatgatagtatccgataggaacataatttttattcaaaatagtaatttaaaatcatataaattcaaaatatcatatatttcttcttgaaccttaatctatattttaatattgtatttactttatttgtatttatctagaatcaatacattacaaagtttattgtaattttatatactttttatccttcctcaaaatataagatattaaatctaaaccattcatagtttcacattaataagtggaactttatgccatgtgtaagtatatctataaattataggccttttatatagctatcaaacgttaagactagatttatgtggtaacttaccgaaaccataaatattttgattcaaaaaagctatgaaaatatcgttaaaggttttaagcagcaagcagtttatggtttagattgattaaatataagtttacattagtgataaatttcaagtgctaagttaataaagtataaggaggatgaggactagaatgtgtacagcaataacactacaatcaaaaaagatggagaatttttttgggagaactatggatttttcttatgatattgagccagaactttatgttgtacctaaaaattttgtatggaataatactctcaacatgagtaaaatttgcgattactatagctttataggaattggacaagaagcaggtgaaatgcttggtttctttgatggggtaaatgaaaaaggatttgcggctgcagcattatattttgcaggttatgctaaatacaagactcataaagattccattaccagggaagctgtttcctcattagattttcttcattatattttaggaagatgtgaatcagtaaaagatcttaaagaaatattaatggaaatagatattgtaggtcttgaagatccagtaacgcaaacagtagctcctttgcattggattgctacagataaaagtggagaatgtgtcgtcattgaacaaacagaaagaggtctaactttatacaaaaattcaattggagtaatggccaatagtcctgatcttcagtggcacatgactaatttacgaaattacatgaatgtatctccaactcagactagcgatgcatgctggggtaacattcatttaaggccatttggtcaggctggaggaactatgcagttacctggaggctacacatctccagaacgatttgtaagaacagcatatcaaaaaacacatattaaagcacctagtgacagtttagaatcaataaatacatgctttcatattatggaaagtgtttctattccaaaagggatagtaataacaaatagagatacttatgattatacaaagtatactgcctttgttaatacaaatacttgtgaatacttctttaaaacttacgataatcctaatattacaagagcaagcctttgggataactataaagaaagtactcatctaatctctctaggaaagttaaggcgtccaattaaatttggagaaatatagtattgattctaccatttaaaatatataagctacacttacgaatgacacaatatccataggtttgaccgtactataattttatgaagaataaaaaagttcaccatacaacaatgatgaactttttttagtatctattatactctactattaatttatttttactacctttaaatctacttatatcttagtcaaactatttctgataagaaaaagtgtattatttttttagttcaattactatatcatctaatgtaatttcattatttttaggatgattttcatctatagtaggacttgtatcaacagcttttccctctccatcacctgattcttgatgtacatcatttgataaatgtactttaggagttattattaatttagttgcatttggatttaactccccaaaacttgacatggattttccggcatatcttccttcactaccttcatttgttgaaacacttgttgctttataaacatttcctaaatcatcttttacttcttctataggaatatctacaataaagtatttctcttgtaaatcctttgaaatttcttgagaataatttaacgtaaatgttgctgacgttttagaaatactctctatatttaattgaactccatttttttcagttgtcttatttattatttgcttaacattatctaatgcttttaaattaattttaaacttccaatttccttttatttctctagaattttcagagctcatatctcctatatttgtgaaatttaattcaaagcttatggcctttctttcttcatctatagtaatagtttcttcacctacataagtattctcagcaaacctttttactccagaacttcctcctgatccaccattataatcttttatagtaagccttggtccattcatattaaaaaatggattatctcctaaatctttatcacttattatttcataggtataagttaaggtttttccatcaaatattgcttcttttattgtgactttaataccattactttcttgtgtcgcccctaccacatctgcatattccttatatttatcatatgcacctgttctaccattatctataaacctaaatatatctccaactatcggaatttctgctgcataagatggataggctactcccaaagttcctgcacctccaattaacaaacaacacaaaactgctatagctattcccttatttctatatgacttatctttatttatagacttctttaaatacttttttacctttgctttttcaatatcagttgcatctattatctccatttcatcttcatctatttctatatcatttagaatttcataaatatctttcatattatactacctccaaatttagtctaagttttttcttacccctataaattctattgtctaacgcagctctggtaagtccaaactttctagcaatatcctcagacttttcccctagaaagaacttcataataaatatgtccctatccataggctcaagagtgttaattaagtttatcaattcatttctttcttctagcttaataatttcttcttccactaattcatttgtgcttatttcctcgtcctctatgcttacatgcaaattcttaacttctttcctgtaataatcaatagctttaaatcttgctatcttaaatatccatttcttaaaatcaacttcttcacctgtaaatttatctgaattattccatactgaaagaaatacatcatttatacactcctcaataattccatccttgttaagtggtgaaagtactttatatactgtagatttaactaacgccagatattcatctactataaattctatggcatcttctttcctctttttcaacctactaatataatttttttcggtacacctcattgaaatttctccaatccattattttcgtaaaagctcttacactttatataacgtaaataaaaatcttttctctcattttatttttatttgttctacatatttctattttattactatataaagattttcacatttattaaatttattaaacctcttcgtgttaaatcaaagtagggactcatagtaaaacggtgctgccttctctgaatctaagaaatactttttacctaatttactttcctttaatatataaattttaagtaacacaattcattttttctaaaatcatttagtttatagttcttgcttatccgctaagacctaatgaattaaaccttttagaacttatatagatctacataaattttctttatgtatttatttcaactgttttaattctttggggcttaaaatatttttaggatacttatgtaattcataaaattaatacgtatataatatacgaaaacaaaatgaagggggtaaaaatatatggctgtaactaaaactattgactctgtttctcttagcattgaagttcaaaaaggattagataaaactggcgatccaatttatactaagaaaactttctcaggcatcaaaacagatgcaacaccagaaaatatctatgctgttgctgatgcaattaaagctgttatggaagctaatactagagactactttataaatgaatcttctagtttagcaaatgcttaagcagataagtgagataagcgagataagtgagagtccaaacctatgatttggtttctcgaacttagttaaatcatgtatatgatttaacttccttgactctactctaaacagaaaggtggtgaattaaatggaatattctttatctatgacttttttaactgctgctggtgaaaaaagtattttaagtgtttctggtgctaaaccaagtcttacaaaagacgagattaatgcacttatggatactgtaattgctaaaaatgttttcaaaactaattctggtgatttagttaagaaatctggtgctcaagttactcaaagacaagttactaaatttgatgtagcttaagttttaagtaacctaaaaaaaggaagctcatctcatagtgtaaaatgtaccctatagagtagacaatataaaaaaagtctaccctatagagtttttctatttataataagattatagagttaggagtgaatacaaatgagtaagaaatttttttcaaatgaggagataaatatactttctaaaaataaatatgttaaaagagttagtgaaaaaggaattacatatacagatgaatttgaaagactatttattgctgaaaatgaaaaaggtaaatttcccagagagatatttgaagaatgtggttttgatattaatataattggtttaaaaagaatacaatcatctggtggtagatggcgctccgcatttcgaagaaatggtgttgaacaattacaagatactagaaaatataatactggcagaccaagtgaaaaagacttatctttagaggaaaagtatgagaagctacaagcaaaactaaaacttctacaagctgaaaatgaacttctaaaaaagttagaaatgttagaaaggagtgtggaaaagaagaaatagcagtgtcatcaagtgaaaaattcaaaattgtaaaatatattattgagaagtacaaatttaaaaatatgcttagttatatgtgtaagatttcaggcgtttcacgttcgggatattatagatatttttcatctataattgtgaaaagtcgcgaatctaacgaagttagagatttagaaatcaaagaaaatattttaaaagcctattattttaagaggcgtaaaaagggcgctagacaaattaaaatgaccctgaacaatcattttaacataaattataatttaaaacgtataagaaggataatgaaaaaatatgaaattacttgccctcatagaaaagctaatccttatagaagaatgatgaaagccacaaaggaacatacagtcttaccaaacttgttaaatagagaattcaagcaaaaatctcctggcaaagtattgctaacggatatatcttatctatttttcaaaaatggtcagaaggcttatttatcgactattttagatgcttcgactaatgaggttttagctcataatgtttcaaaaagcttaaaaatagatatagtaactaatacaatagataagctaatacaaaataacaagaatattcttagaaaagatttatttattcattcagatcaaggagtacattataccagcccaatttttcaaaataaagttaaaaagaataagttaggacaatctatgtctaggcgtggaaactgttgggataacgccccacaggaatcattctttggacatttaaaggatgaagttgatataaaaacttgtgaaatatttgaggatctagttaaagaaatagatgattatatagattattataataactttagagggcagtggaacttaaaaaagatgactcccgttaaatacagaaatcatcttttaaattagtctatctttttttaaattgtccttgacaaaggatacattttagtggataagcttccttttttattatcttcattatctaatgattcaattatacaagttaatatctcatgaaaaatcatgcttaagatttctacgctcctgctgattcaaatattgccatgattctacaaaatgtacccttctgtaataaaactcatttttacgccttgaatagtaaattacctatcttctcttatcccctcttcaggtttaatttttatttttaatatttcagaatatattctcatcactttcacataataaaattaagtttttgattacataatattttaatttagaaaggtgagtgatctaatgaaaaagtatccactggcatttttaatttttttactattaatctttcatatttttacaatccctgttgtagctgagcctaaaaccttaaatgaaggattttataaagctccagatttaaatttgtctcacggcattcatactgtacaaaatacttcaaccagtgattatgcctttattgctattttcgattcaaatcaagtaactaggcaatatatgcgattagatcctcagtcagacaagtatattttaatacctttagaacctgaatttgaaataattgtatctagtaaaggtagcattattataaactagataaaatgctcaattcattttcttgttatctataaaatcaaaaggtggttatatttatgaaaaaatttatttatgcattagtatttttcttctttatttcttctaatattgtaatttcaccttgtatggctgaaagtaaaattcttaagcgtggtttctacaaagttgaagatttaaatttatctctagatactacacatacagttcaaaataattcttttaatgagcggatttttatatttattttagattctactgaaactcctgttcaatctattcgcctatggccccaatcgcaaaaattcaatttatttcctctcaaagctggatataaaattataataactggagatggtgaattagttatttcataagggatacttttatagtgtctcttatgatatgattcctttaaagtattttttatttcattcctccaataaggctttgaaacttaacataaataagcatatcactcccaacaaatttatttatggcttatatgaaatctgtatttttaacatacttcatgacaattacctaattattactcttagttatttctagaaagacaccatcgttaattcctagttcttttcttatttcttttaataatatctataactactatcagtaaatatgttattaaagacaatactaaataaactattatcgctggtattacgctgcccatcttataccattgattaataggtaatattattgatagtgataataacaaaaatccaaccaacatattattcattgatttgaaagaaataatagtctgaattataaacattatcggaaataaaatataaattccagctaaaatccacttactataaggaaaatgagagtctacgaatataaataaaaatgttaatacactcggtaatatagttaaaagtatttttttcataaatcataactcctttaattattattccaatattaaaatatctcgcggagttgtatttcttattggatcaactgaaaaattatttatataatcaagattatcacaattaaaaacatcaactaaacctatttgattattctcatttatatctacactaagagtatataatttgtctttagctatacatgcacttaaaattactttattatttagtttagtgtttttcacaatatttaaatcttttctacttaattgtattatatttccatctaatgataaatagaaaatatatttatcgctataaagaatctttttggtatccatcacaccatatttaatataatttctatactcaattttatttaaactgcctttttttgtatcgtaatataataagaaatctactttgttgtctacaccaataaataaattattatcaactaatgatgcatcatacaccctcatgtttttcattaatttaatttgatctttaatttttaattcatttttatctataataaatagaaatgtatctccttctttatttttatcaaatttataacctaatatataaatattttggtcatcaaaatcaccagatagaagaagagaatcttttatatctagaaatttctcttctgaactagagttcataaatttaattctattgtattccaaagagacattatataaagttaattgttcatttcctttacattttatataacttccacctaaatcagtttcagatgatttaacagtcccattcttatcaactttaaataatttattatctgatgatgttggcaataatatagcaccgttcttattacaatttgttattatgtcccttgcggggatttgtatattattttttttattaaaattctcatctaaatatactatttcactatcattttgaatagaatctgaatttataatacatatattgtatgattctttattttttaatattatgaaacttgtgcttaaaattacaattataaataagagacaatatattcgtttgcttttttgcatttttatctccttatgttaatctcaaattaaaataaactacattcacagtttaaaataagattacatcaataatagatatattgatatttaattttctaaactattatgtagtttcatttttaaaaattatatatatttgcaaatatccaaaggttattaatttcacaaaacaaaatgttaaagcaattagtaattacttctccagtttatatcaattttatcactaactaaatcggttggtaaaacagcatttccaccatccttatctaaatcaataccttgttctatatatgctctccagactaactgtgaacaatagaatgtatctgttttccatttatttaaaaagttataattataactacatccgattttactacttgcataatctacagcctgctcgggatcagcattttttactgtggcgcataaggccttagtatatctagtcttccaatcatttgtatatctacgaactcctcccgatgtcatactttctatcgtaagatctggatttaagtcaaccatgccagcatgtccagtaataggaccatttccaaaaacagtggctggagttacaagtatatccccaacacttccaacactgtttggtgcagcctctgagtcaacactattaatactatttatttcttttgatgttttaggagttgctgtaactttaagtttgtcccaatttttaatcaattcattagaatcgtgtttactcttatctataatctgttgcatttccttatttgttttatctgcaacagtattttcttttgcaaatactgttgatgacatacttactacagctaaaagtgtaaaaatagtgtatttaataataaaacttcttttcattcatttttcccccaatttgattttatatatgcttagttcaaaataataaaatattactcctcttatgttatatacataaattactatacaaatctaatttataaataaaaatttgtattttttgagagtagaacttttatatcaaaatataatttttaatataatcaaaaatccatatttcagtaaccactttgaacaattacagctagatttatacagtatctttatcccccacagacaagtgcaattctccttaatattgagtatttgaatgccatcctatccaagttctatctttagttcacttgcaaattctacagtaatcaggaattaatatattaaattcaaaaatattgatactattccatttaaattataactccatctctcatattgatgatcttatcacaatactttgctatatttatatcatgagttactattattatagtttttccttcatccttattaagcttttttaatatattcattatattttcaccattttcttgatctaatgcacccgtaggttcatctgctaatattagttcgctttcttgtataagacttcgtgcaatcgctactctttgttgttgtcctcccgataaattcattacttttttattagccaaatcttgaatttgcaatttttctagatattttaaagctgttaacttcttttctttagatgtgatttttctaaaatttaaaggtaatataacattatctaatacagaaaattcttttagtaatgcaaactcctgaaatataaatgaaatgtttttatttcttattttagcaagtttattaaagtttaccttatttatttcctgtccattcaaaaaataagtaccattattaggaacatctatacctcccataatatttaatagtgtactttttccacaaccagatggccccattatggctatcatttctcctttttttatagataaatttatatttttcagtgctacagtttcagcactaccactaccataaatcttttttatatctctaagctctattatattcatatttacctcccccttataagctcatttggctttagtttaataatattatttattggaataattaaagaaagcaatgatataagtagcattattaaaaaaggtgcacctaaatttattatattaaaatcatttataaagaaatagataacagtttctccaaaatacatatatattggaatacttagtaagtatgctagcccaataataagtaccatatctaaacaaaacataaatattatattttttttactagcacctaatgaatataaaataccaacttctctcttcctattattaattaaatatatgaatgataaagtaaaaactccaaatgatagtagtgtatatattaataccttcacgctttcaaaacgaatttggatatccacgtcgttaataaatgtatttaaagaatcataaaaattattaatctcaagattcatacctaattctttacctttatctataatttgttttattactgctgaattgtccaaattattattaaatgtaaaaaccatgtttttcatactatgcggtaacatatagttttcttcatttagaaaagttttagttaaaggaataataaaacctttttcacttgattttgtactttcagcaggattcattccatctaaaattaagatatctttctttaaaaaaccaactactttaaactttgaacttttatcatcatttgatataatatctccaattttataattttttttaaatatttctcctaaaattactggagtaaactcgttatctttatcaaagtcttctttttttaatccacttccatatatatttttttcaatttcagaataataaccataattaatcctataaagcggtataaaattcttataatccatattaatggtgtgttgttgcttaaaatcatctgtatttatgttaaattcttctgtacttaacctatctattacagataatctataactcttaatatttttattatcttctatataatcaataaacttccttacgtttcctatttctttttctagcttttccgaatctattccatcttttatgtaagcaccattttctaaggggaaattttccttgtagttttttgtaaaattacttttaaacatagacattgaaaataaattcattaaaaaaaatatataaactatagcttgaaaaagtaataacagcataattttttttcttatatataagttctttaaacaatatttaacgctcatatagtcacctctttctatctaatatgttttaaaacattaaattttaatatacctttataaatccacaaagaatttaaaatagttaacgtaaaagtagctatacttatattaataatattaattaaatcaaaactaatattacctgcaactagtgtttctaaaaagtttaacgtcataatatttaaaatacctgctattattgatgaaaaagttattaatatcaacatttgatatattaattgtttaaaaatatataaattatccgcacctaaaatcttttttatcgcaatatttttctttaagctatctgcccaaaaagttgaaaagataagtatgcttattactgctagtaatattgagaataataaagatatataaataggtttattattactaaaaactctgctagcaataccttcttcttctgataattcattaacttttatgctttctatatttttatcgctggaattacttttcaaatcgtaaaaatagtttttttgttttagcatatcctttgggtaatataatcctatagactcataatcagaattatatatatcattaggtaaagaattcacaggaatgaaaattcttaatccccagtaagacaaagtttttctacctataagtcctacaacttcaaactcttctccttctattttgatatattttttatcatttttcatataaattaaatctgctagattacttccaactaaggctatttttttatttgatatgctttcttctttcgtaaaaaatcttccttctttgagtgggaatattttgtctaaatctttatagttatatattcctattaaataagcagttctatttttttctatctctaaatcaaatctaggcgtcataaatccaacatcactatctcttttttcgataatatctacaaaatttccaaggcttgtattttctttaaacttaaattctgcagaacaactttcttttagaacatagtttttatcattatataaattataaaatgttgtaaaaagacaagttcctgctgataagcaatatatagctatagtaaaacctaagcatataaatatagtatttataggcttaataaataattcttttaaaaacattttcatgtatatatcctccaaaaacaaatttcatcaatatgtgtaattttattaaaaataacaatctactatttataatttacttcttgttttttatagttatatattaattttatagaaaaattctttcctgatatagtctcacttcttcattagataaaagacataataaaagtaacctcttactttaaaatgcttaaattaaaaggttacttttgttaaacaaatatcttatacttctaaacgtaaatatctattagcacactgaggatccttaactgtatgacgacttctgtatccacctgtagcacggctagaactaactgttgtataagcttttggtttgccataatcctggttgccatttaccttgtaaccattgctatctaaactttctacatatacatatgccttagcatccttataactagtagcatgttctattgaagtactagcttctgcatatccactcttttcatataaataacctgtaaatgtatgacaaggacttacctctgtcaatgattctgcaaaagcaggaacaacaactgaagttgtaattactgcagataatgcaaagatacttaatattttgtttattttgtttgttttcataaaaaaatcccccattaaataaatataattttgaatgtattaactattttcatatatctttcaagcaattctaaatttaattatcaccttatttgtttttgttaagtttaattagtgaaccttctaatctctcttttttagattcttttgaagtatattctaactcaacatctattttatctttttcaatttttttaataataaatttaaacatacaatcagaatacttagaatcaatattctccttttgagaagaatcaacattaaaaaggatgccaatatagttctctccttttttatctttttcgattttatatttaaaaccacttgaatcagtcaagtaatctccatggtctagtaaatatgtatctactattacatctgaattactttgaaaatttaactttatcttactaggtttagaataagctttattttgtatattagtatcaaattcccattctcctaataaagattcctcatttaaagttattgaatctagattcttatttccttcatcgccttcattatcctcttcgccaattatatatgtctgattgctttgattgcctgaagttaataatttaatagttactatacttaaaattgctataaaaaataaaattataatttttttatttctagcaattttaaaaacttttttaatcatatatgtctcctttcgttttatatattctcataatacttgaattaagtgaaccccttttcctctaaacgcataaaattaggtataaatcattaattttccctatttttttggtattttctaagagaatcttttaatgcataaaaatgtacgttttatgccaaaattatgtttacttttctctataacctgtcgcatttccttgtttgttttatctgcaacagtattttcttttgcaaatactttgatgacatacttactacagctagaagcgtaaaaatagtatatataataataaaatttttttcattcattttcccccaatttgattttatatatacttaattcaaaataataaaatattactcctcctacgttatatacataaattactagacaaatctaacttataaataaaaatttgtacttctcttaaatataatttttagacctgttgtaaaatgaaattgaactagtcaggaccacccgttaaacgggtggcttgctctgcggctgtaagcctaaaaaatatatagaagcgtttttctaactaaaactgtccatatattttttaattgtttggttattccatattttagatgatgttatgaatcttaagttttataacaacttatagttttgcattaccagtatcagtttagtagttacacgaatcttgtgataaaaccattgttttagaatactcatagttttttaacggtataaccaaacgcccaccacccgcttagcaggtggttttctgaacgctaaagcatacaataaaaaatccatagtggattattctgtgttatgatttaatcgttaaacaaaaaacatacacggaggataatcactatggactacccaaataataacacagaatcacgtaaaaataaacatttgaattttgaagaacgtatgcttatccagcttcgtctaaaagatggcttttcaccttataagatagcaaaagagttaaaacgacctataaacactatcttaaatgaaattagacgtgaaactaccactcaaattaaacaagaaaaatacgttgaagtataccttgccgatactggcgaagccatatataaaaagcatcgtataaactgctgccgcacttttaagcgcttagaatgcagtgatttcataaactatactgtggataagattaaaaatcattcatggtcaccagatgcttgtgttggcgaagctatcgctaacggtagatttaagcgttctcaaatggtctgcacaaaaacatatataaccatataaatcttggtttattagatataaaaaacactgacttaccaatgaagctacgtagaaatacaaaatctaatagagttaaaaagcataagaaaaaacttggttctagcatatcagatcgcccagtagagataaacactctgcacgagtttggtcattgggaaattgacactgttattggtcaaaaatctaataatgataatgtactacttacaatagtagagcgtaaaactagatatgctatggtaatcgatattatagctaaaaccgctgaagccgtttctgatgctcttaatagagtgcgcagtttatttggcaagcaatttagccaagctttcaagactataactggtgataatggctctgagtttgctaacttatccacacttgaaattgaaactgatacaaaggtgtatttcactcacccatattcatcttttgaaaaaggtactaatgagcgtcataatggtctaatacgtcgttttatcccaaagggtaaacgtatttcagactacacttctgatgacattgctttcatataagaatggatgaatactcttccgaggagaatacttaactataagactcctgaagagttatttgaggcacacttagataaaatttacgcagtttaagaaaatacaagtgtttaagtcataaatagaaattagttcaatttgttattgcaatttgccaatataatttttatttaaagtacaaataagttttttgctataataaaaaaatcataatttaatgctatcccattttccatccttcatttttaaagttttattgcaaaagcttgaaacaagattatcatgtgtcacaactaatattgtcttattatgtttttggtttaattcttgcaatattttcatgattttaatgctattttcttggtctaatgcacctgttggctcatcagctagtataatttcactttcttgagtaagcgctctagcaatagcaactctttgctgctgccctcctgataattgcctaatacttttattttttaaattcaatatatctaattcatttaaatactttattgctttatttactctttcttttcgcgcaatccccctgaatttaagaggaagcattacattttctagtacactaagatcttttatcaatgcaaaattttgaaatataaacgaaatcttttcatttctgattttagataactgattaagcttcttaaagtctacttgaaaatcgtcaatataatattcaccttggcttggggtatctatacatcctaatatattaagcaatgtgcttttaccacaaccagaaggccccataatagctataatgtcacctttatccacctttatgcttattccatctacagctataacttcgttatcaccttttccataggttttatatatatttcttaaatctaatgtactcattctgtaaatcctcccatcatatctttcggagtcaacttgtttatttcattaaagcttattagcataattaaaataattgttaataataatatccccatggaaatatataaattgaataataagttttcattaataaaaaattcataaacacttccacagttctctaaataaaataagcttcctcctataattccaacaagtatatttataagaaattcagaagaaaatgttttaaatatatcttttttactaattccaaaagaataaagaattccaatcctatctacatcctcggctattttataattaattgtagtaattattgatgcagatgcaataatggtaattataattattctaaatatttcataatacttttttgattttatttcttctaagaatttgtctaaatcatcaccaaaatctgaaataactatgtcatccgaaatttttcttatatttgattctaattcagttgaattattttctttgtcaccattgaaaaatattgttataggttgatatccaaaattttgaaagaatgtttcctcacttagtggaataacaaatgacttatttaataaaaatgagctatctacactatttgtataatcaaatgctaatacatccttcttaaattgccctacaattttataagttatattattaactacatagctagtaccaaccttaacttttttagccaaatcatttccgacaattacaggtacatattcatcacttctaatccattcctcttttgaaatctcctgagttatattattttgataatgttctatcattccataattaaatccaattggatgtatcaactcatcagttgtatctttttctgtaaaattagactctaagtctttagaatctaatcccaaaacatcagttggaatatccgtatacaaatccctttgaataaacccataagtataattattttttgatattaacttaaggctttcctttatatcatttttataatcttcaatatctttattttctttaaggatcattttataaaatgtcatgaacttagaattatctatagaaattgatctgttgtacctatttctatatgacctatcaaagttagttaaagaaaccaaagaagcagcataaaatatccataaggctacttccaatataattaatacattaactataaagtttctttttatatcaaaaaagataaatttacttttcatactacttaccttatttctttcattattttgaatctaattacattaaacaacacgagtatagatacaattatagatattataaatattagcattgaacttaatataatatttgaaatgttaacagctgaatattgagatgtgaaagatttcatcataaaatctattgtaatttttgataaggccagtccagcagcaattccaatagaagatattcttatgaactttgcaaaaacctctttaaatacatcagagtttttagctcccaatactttcataatagcaactttttcacgtatatttttagcaaagaaatatgaaaataaaagcaaatttgctataccaagtattatttgatataaactatttttaagttcgtaaacatttttgaataaataatctataaccgaaatcctcgaaatctctttttcagaagcgttagtatttttcaggttaatttctttaatatctatattacttatattattctcataaaaaataacattaggaaccttagtgtttataaaatatagagatcttataggaattatactgctgtatttaaatacttcagtgtttccaagaaccccaataaccttataatcttcattaaatatttttatataacgttctccatttttctcttcaactaatctttctagaccaaaacctataatcgcaactttttcattgctcattaactcttcttcagttaagtatcttcctttaattaaatttctgctttctatgtcaaccccatcagagcaaggccatatatcattaatataaaacttattatcaatttgtatttgatcttcaaatggctttaaaataattttcttatatcctgcctcttgaacagcatctactatttctgataagcttggattttctttatcctcatctttatttacaacttcagctccatcaacatatttagtctcatgtactgtatctatttttagatacctataatctttattaaatcggttctgttctgtaactttattataattggaatatacaatgcttactgttaaactaaatgcaaaagttgacactaaaaaaccaattattaaaaatagctctattttagtatatttactcatatattgctccacatgaatattagtaaagcactgagctttactaatattcttatctaaattttgattttaaactagcctacattcaagtaaatgcgcttttttctaaacctatgagtttgagatataactcatcttccacacattttatgatgaggcagtgtatattttcctagcattgtgaagttcttgcagccactctagcatataaataatcatcactaccttaaattgtattcacgtctaatgttttacatatacttattttaacatatatagcattattgctgagatttattttttcttattctatatttcaattgccactagtcaaatgtaattctacttcaatttgcacattccaatccatccagcaagttttatcgcttaccttaactacaaatgataaagtaacaggaattaatataaaataaattgtaaatacaaaaataaacggtagttggatttctcattcctgactaccgcttttttacttttatgtatctttcatgaactaatattcaataatgttatttaatttaatgacatacttaatttgaaaaatgactttaaagagatgttaactcttcttctaatttgataagattagttgcaatttttacttcatataatatattgcttttcttaacttgtattgttctttcttcatattattttcagtatatcttaaacattatataatgttattgtcatataaaaactcactatcgttcattatctcattataatcaccatctctaataattgcatgattgcttgaaaaaacaattgctcttttaaataccccttttacatattcaaagtcatgggtagaacataaaatagtttttcctgcattatttatagctatcatgaattcttttaaaaatctcttagttttaggatcaagtccgttcattggttcatcaaatatataaacgtctggatttaaaactactacggtagctatagaaacctttttcttttctccaccgctcaaatgatatggctgtctatctcttaattcttcaattttcaataattttaaagtgtcttctaccctttttctaacttcttcttcatccatccccatctgtcttgggccaaatgcgatttcatcatatacatttgaacaaaatagctgtacatctgaattttgaaaaacaaaacctacttttttatgaaaagcctttgagaactcttcattttgcatttttttattattaatttcttcaccttcaaataaataacttccactatcagcaattattaatccattgattaatttcattaatgtagacttcccacttccatttacacctattaaagcaatggcttcacctggatcaatatgtaagtttacattttttagtgcggtaacttcagcatcatatgaataattcgcatcttttatatcaatcattaaatcacaacctatcaaaataaaaatatgttaacacaaaaattatggtaagaataaaacaaatataatcaaatagcttaaatttaaatttcgtatatactttatatgttcctgtaaatcctctagattccattgctccatacatctcttctgccatatctttagactttataaacatagttcctacaactccagaaagtgcagtacttttattattgtttttacctactgatcttaatttaagagcataaaccatatttaatgaaaattcgcctaaaattataatatattttatagtaatatcaagtaccaaaataaatatatctggtattctaaatatttttaaagtaattattaattcattccactgggtagtgcaagttaatatactgacagaagcaactgaaactaatacttttaatgtgatcattaaggtattattactataccctaaaaaaatagctggtaacaaaataataaacgtaaaaattgccgccgccatacttgctttgacaacatattttatttcttttatacttaaaagatttattagcacaagcataaacacagttgtaattacaataaagtgaaaatttctgcttaaggaaacaaaaataattagtatgagcgttgatattaatttagttaatgggttaattccaaatttagagtttcttattttagtttgctgcctaaacatagcaagcacattaaatattgacagaatgctcttatctataaaagaattcttgtcttttagcggtgtataattgtctttttttaaaagccattctggcattaataacttcctttcttataacgtatattaggcacatttaaaagagaacccaaatataaaatttggactctcaattttgtttcactacacattgctgaattgatggagcacatataagttaaactaagattcagatttaaatcacctcacctgaatcaagtttcactttatacttttgttgtctttttcatacttgctattattctaaatactaacaatagtattgcaacacctgcaactgcagataaaatatatccaaaattatctggaagacctgaaacagaataatctggcattaatgaattaaagctaaatccattttccatacctttaggtataaatcctagcgtattaccacctgttactacagaacttatttcatcagttccccattctccccaagctgtacctgtagctaataaccctaatggtgagaggcatattagtgctattattaatccatatacaggctttgattttgtaatagctccctcataaataattccaggtgaaactttttttataaagcttaatacgccaacagttataattccttctaatactcctgcaactacaagatgcggaataagcattgaaggtatagtaattgataaaggataaggacaatatagcggtatacctgctgcatctttaaaaagtaatggctgcactccgaattctattgctgcacataaagcggccaaatttattccaatatacgatgcaataaatgtcccaatatattctcctttctctgtcttaaatttctcttttaaaaacttataaatataataacctacaaatggtatgacgaatgccatattaaagcaattggctccaaatgctaaaatacctccatcaccaaatagtaatgcttgaatcaaaagtgctatcgtcactgaaatacatgccgcctcagggcctaaaagaatggcaattaatgttcctcctacagcatgtccagtggttccacctggtaacggaacattgaacatcatcgttaaaaatgatagtgatgcccccactcccataagcggcaatttctttttagttacctctttttttacttttgttacagctcttgtccaaactggaatcattgccgcccccataactgcacaggtagctgggcttagataattgtctggaatatgcattttaattcctcctttaaagcatgtgaagataattacacttgttatttcctcaatatgcccaatttttaataaaaacaaaaccacaaaaactgattacaaataaagcaatcaaccttcgtggttattaataatccaaattaatctattaatttatatatgttgcaattcacaatgcacatttcacaactacagctaaaattcttttaatatttttaaaattatgctgaagaattatttttgcaatatataattgtatgaaaactgtataccctcgtagtatacagttttatgatactatacaattccaaaattgtaaatattaaattacctttgaattcttgtttttattttttcttcaatatatgtaacaaacgaatttaatccttgtccagttcttgatgatattctaaaggtggctgccaatggatttaattctttaacattttcttctaccttattgtcatcaaattcaaagtattccatcatatcatacttatttaatacaattgcatcagctttagaaaatagtaatggatatttttcaaccttatcatccccttctggaatacttaaaacagcaattttaaaatcttcaccaagttcaaactcagcaggacagacaagattaccaatattctcaataaaaatcaaatcaatttcatctaaatcaaagtatcctaagatattataaattgcttttgattctatatggcactctccttctgtattaagctgaatgacagaaattccaagtgaatcaattttttcagcatctacttgcccagcaatatcgccttcaactacagcaatattaaatttatcctttaattgttttattagctctataatcaaacttgttttgcctgtccctggtgaacccatcacatttactaaatatacattttttcttcttaaaatttctttaatatcattgttgaaattttcgtttaattctagcagctgttttacaactttaattttcatccattcacctcatatctgcaattttttaataactttattattttgtgtttccaataataatataaaatatcttctctttattctataataatatatgttaagaacaaaatcacagattaatttcagtcaatttaaaattatatagtctttttatgaaatatgtgaccaccaatcacttaatattattaaaaagcacttgacttgtagttaactcaaaggtatagaataatatcataaactataaataaaaatcttatttatagtttagcactaatttatttatacattaactacttttattaaattatatctcttaatcatagcgaaaggaatgatcattaatatgaaaattgcagtaatagatgcacaaggggcaggccttggtcaaaacatcataaagaggattcgtaaagaaatagataatgatgtttatattattgcacttggtaccaactcatttgctacctcaaagatggtacaagctggtgcaaatgttggtataagcggtgaaagggctatcagttcattttgcaagacaactaaaatagatagtataataggaccaatcggaataatctgtagtggaggtataaacggagaaattaccactatgatttccaatgcaatatttaatatggattgtactaaatatatacttccattacaaaaacatggcatttatattcctggaactagaaatctacaaattaaagatataattgaagaaattgtacttgatataaaaaataatatagaaaaattctaatccagtattaatagattaagattaatttattaacacgcctataattaatatccaattaatatattcttccttctatatcattaaattatatttttcaccaaataaatggaataatccttttagtattcttcttatactctttatactgtgtcttgaagttattttctaatatcttttctgaatacaacctcaatatgattccaacaatagtaactgcacagcctatccaaaacattatttcaggtaatatcattaaataattctttctacaaaaaagattcagaaatattatagttatagtaccaagtactagtattaagcaatatcccctattccttttttcttattcaagtcctttctgtttataatgaagtatgactgaaaacaaatagacagtatattgactacactggaataatatgctattgtaattttagacagtatattgtccaactaaggaggagatattttatggataactataaagtgctttttttaatacaacaaatatacgcaactctgttttctcttactaataaaattcaaattaaaggcaatgaatattgtgagcctttaactagcagacagcttatggcaatggttgctattatccatttacctgaaaatgaaactactctaaataatattgctaaaaaactaggtacaacaaaacagagtgtaaaacaattgattactaatttagagaacaaaggatatgtaattactgtgccaagccaatatgataaacgtgcagttaatgtgaagattactaaagctggaacggacgccatgatgataggtgccgaaaaatcgatggagttttttgggatgctttctaaagacttttccattgaagaaatggaaatcttatggacgttattaaagaaattatatagatttgatggcgaagagcaggatggtttcgaagaagaagctgaatttgacatgggtgaagatacacttgaaatacaaaagagagcattaaatgaatttgatagagcaagaaatgaaggaaaataaaaaataaataaaggcggtacaatattatgaatgatattctatctaataactctcaagatcttaatgactttttatctaagtatatgaataagtggaaaattcctggaattgctgtaggtattattaaagatgatgaaataatatattgcaatgagttaggactgcgcgatgttaacaaaaatttgaatgttacaaaagatactttatttgccataggttctgcaagtaaatcttttacctcactatcaataggtatattagttgatgaaggtaagttagatcttgatactcctataaaaaaatacatgcctagttttgaaatgcaaaataaatatgctgaagaacatcttacattaagggacatgctttgtcatcgttctggattacctagacatgatattttatggtatacaaatccttctttaagcagaaaagaactggtagataaaattaaatacttggaatttagtaaagatttcagagaaacatggcaatataataatttgatgtatgccacagctggctaccttgttgaactagttacaggaatgacctgggaagaattcgtgaaatcaagaattcttgaacctcttggtatgaatagcacaaatttctcagtggatgttttaaaaaagtcttctgattacagtaagccatatgcacaaaaaggtgaagaaattaatcaaatagactttagaaaactggattctgttgcccctgctggttctatgaattcaagtttgactgatatgttaaaatggcttaaccttcatttaaataaaggtaaagtaaatggaaaacagattatatcagaaaaaactataagtgagttacattcacctcaactcccttgtgagctaatccctttaaagtttgatgaattacaattctcatcttatgccttaggctggtttgttgaagcctatagaggaagaaaacatgttaaccatggtggaaatatagatggattttgctcctatacgagctttcttccagatgataatattggcgtagttattcttactaatttaaataatcctgtctgtgcaatgcctatagcataccatatatatgacaatcttttaggctatggacatagtgatttttgtgaaaaactagaggatgaagctgaaaagatgatgaaagcaatggaagctgctactaaacctacaataagctctaaaaaagaaaactcaactccatctcactcccttgaagagtatactggcatatatgaaaatccagcatatggttctttaaaaatcgaagtaaaagataatatcttaaaattaatttataataatatagactatacacttaatcataaatgctatgacatttttaccatgacaataatggaatattacttggttgatgtcacctttaattatgatagtaatggaaatattaaaagtgtttcaataccttttgaggagactgtaaaagaaattttgttcatgaaatgtaaataataatacagaattgcatttatagatcttctttatttgcaattctctttataacttcagtaccttcttctacagcaataatatctactctaaaatctactaaaaaacattgtgaaactctattttttatcagtgcaatttctcaacctacatatgctcttattgattaataaacactgatcatgtgcttttaatacttacaaaactctaattattcctaataccaaaccaacgcaaaagccacaaatagcaccatttatccttatccactgcaagtcatcacctacacgctcttcaatcaattttataagggtttcagtatctaatctttcaatattatctctaactaatctgcctatattttcatgattggaatttatgtaacctgatacacgttcctgtatctgctgctctaatttatttattaaatcaatatcctctgatatattgtctattaaattgcttagcattggcagtatattatttcttatgtagtcttctttaacataacctaatattatattttttaattcatctaatatttttattgtaaagttatttagttcaacattactgcctaatctcattttatactcatctattttttgtataacttcttcattgttacttatgtttcttatattgctctgtattaattcaagcagtgtaattctactggtattatcatgtttttttaaatcctttaatattacaacgactaaatcttgagctatttttcctactttatcttttcctaaaacatttaagactgtatttaatgaatattgcattattccacttatctttagtttatttatagaattgaatactatatttccaagttcattcttcactttatcttgctttactatctcttcaagcttaataagtgaattatctaaaattttctcttcataattatttcttaagaatatgccaattaatttttcaagaaagtttttagaatctaatgtattcaaatatttttgaattagtttaagcaaagataaagaaactttttctataggaatatgctctataacacgtttaataacatacattcctgcttctattccttgcttagaacatataatttttttacatatgtttaatatttttttcactacctctaattcatgtactttatttataatacttgatttattgagcaagttgttttcaactattgatactaaaccttctgttattcttttacgattcctaggcagaagtgcagtatgtggaattggaattcctaagggataccgaaaaagtgccactactgcaaaccaatctgaaaatccacctaccactccagcttcaaatccactttgcaatatagttattataggggtattttgtggaaacaaagtaattatgaaacctataaacataatgactaataaaattaaggctctttgattagttttcattttcatattatagcctcctatattgtcagtatgtaaacatattgtaaaatttatactagactgaggcataataaaaaaattaattagcaaatttaaattctggatctaatttatttaattttatattccagtttgaagatttataaatattgtaatcagaagttattgccatgcatgaaacaccttgcaaactgtctataaatttcaaaccattatctacacctgctataaaaacagttttggttaaaatatcagcaagcatattgctatcaggaacactgctgtctacaactatagttacgctcattacaccattatctgttggatatcctgtgcttgggtttaatatatgatgatacctcttaccatcctttataaaatatctttcataatccccagaagtagaaagtgcttgttctgataaattaattatacctacataatcttgatcgctgtcttttctaggatgcttaactccaacattccatggtgttccatctggctttttaccaactgtatatatagaactacctccaaggcttataatcccgcctttaatatcgtactctttataaatttttaacacttcatctgcggcaaatcctttagctattccacctaaatctattgccataccttcttttagtaacttaatactattattctcttcatttatactgatatcattatatcccactaatggtagttttgatttaatctcttcatctgtaggtattctttcgttatcagttcctattccccaaagatttacaagtgggcctacagttatgtcaaataccccattactcaacttagaatacttaactgcggtttcaaccatttttataatctcaggatgtacttgtacatattctttacctgcagcttgattaattttacttatgtcactgctatctatagtcacacttgccattttctcaatctcatctaatcttgaaagagatgcttctatagcttcattagcttttggaccatatgcttttagctgaaaaacagtatccattttcaatgtcgttttagtaataatctcctgattctttgaacaccctgaaaaaataagaatacatagtatgcatgtcattaacatagatatttttttaatcactttaatcgccctcataattcaatttaataaatttgttaacctaccaaacattttacatcattttagattcattttatagaattttttccaataaagtaatatttttatttagcattttatagataaacaatatataacttagatttatgcgcatacctcaccgaaatgaataatatacttttgttccagtttctaggtaattctgatgggtgattctaaggctataaagttgcacccaaagtgctagcctcaaagaacaagctctgaactagcacatttggaacaacttatagccaaagaatcacatccatcaaaattaccaatgaaacattccacaaaaatatattacccatttctagttgggatatatttcatagtataaatctgacttataattggcttatatctatatagatgaacatattaacaaatttactaaaactttaagttcatatctttactagaaatcataaatatatttgtgtagaaaacatttgaaaatgagctgttaaaggttcttagctgtaggttgttccattttagcttgtcaaactgaaagttggagcatgctaaagtggatacaacctgctgcttagaaccttcagcgatattttcatagcttttcggaatcaaaatatttatgatttcggtgagttatacgcctaagtatagattatagttggtttattgctaaaacttactatgaatagtataatctttttatgtcaaatactttaattataataaatgcaaactatagtctgcatttaagtaataagggaatgaagtgaaattcttcaactaccccagtaaccgtgaaactgacgaaatcaaaggcagaatcaaaagtaacaagtccaatattttattttttgattatgtctaacgtgccactgagaaattgggaaggcttgaaattaggatgaagttaagtcgggataccttgattttatacaccgataatatcctctgagggtgggatattaggcacatggcaataaattttaagtacaacgctaccatgaatatttttcatcagtcaagaaggtaaattgatctcatcatatcaagtctattaggtcagtctacttccgaaggatagttgaaaataagctggtaaatgaacttgttattttttgaatgtgacttaagtaatcatgcgttttattaaaataagacttataagttttattctgatttttataagcatgtttattatgcgtctatgcatactctcgatgggtatgctttttttgttacccttaaatacaatatattttaggagggcatcatgaaactaaaaaataaatttttatcactttttctaatagttatattagctatgagtacacttttcggttgtggtaataagactgcaacaatgacagatagagaaggtaacagctttaagcttcccgaaaaagtaaacactataatatctacagcaccatcaaataccgaaatattagttgggctaggactttcagataagctagtagctatagacaaatattcttcagatgtggatggtattaataaagatttacctaaaattgactttaagaatccagatgctgaaactcttgtgagtttaaagcctgacataataatagcttcaggacataataaaaatgggagtgaagacccctttgcagctattaaagaagctggaatctctgttgtatacatacctactagttcaagcatagaagacctttataaagatattgactttatatcaaaaatcactggtactgagaaaaaaggtgatgaaatgacagctaatttaaaggatgaaataagttcaataaagaaaattggagatactattactaataagaaaaatgtatattttgaaatagggtcaacttcaggtttatatagttttggtaataatacattcttaaatgaaatgattgaaattgtaggcgccaagaatatctttgcaaatgaaaattcgtggatatctccaagtcctgaagctgtagtaaaagccaatcctgatgtaatacttacaaatgaacctgcaagtaatgctatcgataatataaagactcgtgagggttttcaagaagttactgcaattaaaaacaataaagtctttgctattgataataattcctcttcgagaccatcacaaaatgtactaaaagcacttaaacaaatagcaaaagctatttatcctgaggaatatgcaaatgtataaaaaaattattatattagtaatacccttaacatttttaattttatgtatcggaacttctattggaagttctgatactagcttaatccatattgcatcgataattggatataaagttttaggaattccactacttaaagagattaaccctaatgatgtggcgataatttggaatttaagattgcctagagtttttttagcctttcttgtaggtagttccttatcagttagtggtgctgtggttcaatcattacttagaaatccacttgcttcaccatataccttaggagtatcttctggtgcttctcttggagttggatttcttataatatctggtttttcaatacctatgctcggtaggcttactcttcctttaacaggctttttatgtgggcttttgactgtatttattatcataaaatttgcctacaatgttgataaaagcatgtcaacttcaactataattttatctggtatggttttttctttattttgcagtgcaatacttacaacagtaacggccttatatagtgaagatataaaaagcatagcactttgggaaatgggttccttttccatgaagggatggtcatatgtacaaatgggaattcccttttttataattggaataataggtgttatgcgctactgcactgaaatggatatattatcttttggtgaagatcaagcaaaatcagttggagtagatgttaatactataaagactcgacttcttattttctctgctatattaacaggttctgctgtagccttaagtggaattattggttttgtggatttaataattcctcacttagtaagaagaatcattggagcaaagcataaatatgtaattccagtctgtataattttaggcggctgttttatggtgattactgatctagtagcaagaataattataataccatcagaattgccagttggcgctattactgctctgattggagctccattttttgcatacatatactttaataaggcacatgaaagaaaataataaatcaaagtaggtgatgattttgttagagcttaagaatttttcttgtggatatgacaaaatagatatcataaagaatataacatttaaagctaaaagaggagaaattctttgcatagttggtccaaatggatgcggaaaaagtacgcttttaaaagctataggcagactcattgaatataaaggaacactaacatttgattcaaaggatataaaaaatttacctgtgaaggaatttgcaaaacacattgcacttatgactcaaagtaacaatgtttactttccttacacagtttatgaaactgttgctttaggcagatatgcttatttaaaaggagctttatcctctttaagtaaggaagatgatttaatcataatggaatctataaaaagtgttggccttatagattcaaaaaataaacttataaatgaattatctggcggccagcttcaacgtgtcttcatagcaaaagcctttgcccaagatccagaaattattttattagatgaaccaacaaatcatcttgacttaaagtatcaaattgagattctagaatatttaaacctttgggcaaaagaaaataataaaattgtaatagctgtattacatgatttaaacttatctaatttatttggtgaaaaaattatattactaagcgatggcgaaatagtcagccaaggtacacctaaagaagtatttctagaagataacttaaaaaatgtatataatatagacgtaaaaaatttcatgattagtgctttaaagcagtggcaataaggtatatctgtaaaagaagtgaattaattgaatgcttattttctaattaaattgaatataatcaaaatatagatatccaatagacattagctgacacatgtgtactccccccctttattggggcattttttacgctaaatattagcattggggatttaaagctacttcaagtgttccgtataatgtttgaaatgtttcttctggtggtatggcttttatctccatacttaacgaagatcttataattgaacaatctatccgctttcaaccaaactcattacaatatgttttaaatccaattcgatatgtttataaaattataattctataaatccaatttttttataaagatttacagcatctgcattttcagggtgtacatataaaattaaatcatcatatcctaaattcattaacacatttatgctctttttcaaaagattacttgccatccccagtttcaaatatttcttaactgtaaataactctgaaacaaatggtttttctttaaacaaacttataagaattacagcagcaatttccccattttgtttaatttgaaatgaagcatcgggaataaatgtaccaaaagtactttcaacaatactacaaatttctttatttaactcttctattgtttcgccattgaagtctactgtatctttaaatgcgtctaacatagaaactgataatccatctatatcattagaatctatcttatcaaatgtataaattccttttagttcttgtggtgagagtttgcaaatcatacctattctttcactcatatattattctcctaatttttttcttattttgtcctatatgaaacttatattgtaaattataatatattttctaatatcacattattcaatttccaaagaagctttttataattacttagtcaaatctacatattatagtttaaatttgccaccatcctgacacattgggctattataataagattatagatcttacaaaaactttttttcataaattttttcccctataaatataaatcaaagagtaacattcatatccccgttataatatgttactctttatttcatttaaagtaattattaaactcatacatgatttagtgatattaaatatctaaaaatcacaaattcacttttcccatacagtgcaatttcattttctatcatctattatcttaatttataacgtcagaaatcagcttatttatataattttaaattttctccttggttttcaatccacaagtttaaaagttcttttagatctttagccttttccttatctgtagcaccttcattagattcgagtttttcaacaactttaaactcgaaggcgctttccccatgagctgcccaatcttcctttaattttttagatttagctctccccaaatttagctgaaatttgattgattcaaaaggcttatataaatttgtacatatatctacgaaagaatatccattaactgtattatatatttgaattattcccatttctatttcttgttgtttataattatttattatctcttttttactcattttatccataataacttcctcacatttcttataatatttacttccatcatcatttcttcccaagtatccatagtctactaagtatcgtcgtattatagcatcatcttcgtaaataggcttaataattctttttacttcagcttccgtatactctttatttggttcaaacaagttagcaaaccttggtaataatgcttttcttttctcctctttagctggaaattttctaagttttggattagctattttactattcccatcgtcagctaactctatagctgctaagaaagctcttgcttgtctcgctctttctcttaacgcaaacctcatatttcttactgttgattctgcacatccaagcttaattccgatttctttattactatacttatttgacaccatttccaaaagctctttctgaatttcagtaagtccagtatatttcttatcaagcataagtactctatctatagggctcccatgctccgctgtatgagcgcttatgtcactaccatttttacctgtatattttccgcatattaaacaaataaattctgcttttttgctatcccatatgtaaccccttttaaagtcgtcaatagttgcatcacgaataagctctttcatcttcttctccttgtctattaatttaatagacattttatcattttaatatatatatgtcaattttactgtttaaaattggttaataaaatatcttataaatatctcattaaccaactttcaaagaatattctatagggtactaaatcaatctaattcatagtcagcactattatattaaaaattatatctttaaaggatttattgttattattaaatttcaaatgtatagaagttcgtaaagagatatatgatgaattttacaaaagaagtttttagctttagcgttgtagtgactgaacatcaaataaataaaaaaagagctgactatctattatttatcagctcttacttaggtattttttatattttatgttcttcattgttaaataaaaccactttatttcttccagtattttttgcttgatatagtgctgtgtcagccatttcaagcaaattatcaacttgagttgtcatattaggatatgatgctattccgattgaaattgtaatttttataaatttattatctgaaatataaaagtcattatcttcaaccttctcccttagtctttctgcaatcttgactgctttagagtctgaacaatctaataatattatagaaaactcttcccctcccattctagatacaacatcataagccctgcatgtatcaagaagtattaaggctaaactctttaaaatagtatcccctgcattatgcccataagtatcatttattttcttaaaaaaatcaatatctataaacaacatagatagctcttcttcttttcgtacagccctctgagaaatattattgaaactattgtcaaattcccttacattattcaagccagttaaataatcttttgttgcctcatttcttaacttttgataaattctaactgtttcaaatatgtagtctgcgtatttaattgagatatacgatactattaaatatccagaaaagtataaactcactgcttgaaaaacaaatttaacattttgaggtactgtaaatgatgaaataactgatgctataacaaagaagatcatggaataaatatatttacgtttttttgatatctttaataaagaaataattccaaatccgatccccatagctaaagcaattgctgatccaattagtgatatatcagacactcccaaaattaaagatctaaaaatagctatcagaatggaagcaataattgaagagaaaaatccactataaatagcagaaaataaaattggtatgtacctaaaatcaataaaagcatctggcgtaatatgtacactgtttatcatcagtatcacacctaatatcccgctataaagtccccataaaaacttactttttagcgacatatcttcaaaaattcttttattcctaagaagatgctgagcaatactcataaacgctattaaaatacatgcattttgaaaaaactcaagaaccataatttataacccctttttcataaatttataacttcttatccaacaaatttaatatttctaaaatcccccattatagatatcaaactttaaaactacatttacgtgataacttaccgaaatcataaatattttaattcctaaaagctatgaaaatatatttatgatttctagtgaatatatgaacttaaagttttagcaactttgtaaattgttcatctaataagtctaattcttaaattgtttatctatatatttaattctcaaagtcaattctatatgttgtaataataaatttacattgaaaattccaattaggcaagtcctaagttaagatcaaaatgttgaaattcaatttcaacatatatattaggtaagctgtaatattatcttaattgctgataatattacaacttaccgaaattacaaataagaatcaaacttttctatatatctatttctttaaatatcttatttatgatttatcaaattaccaaaaatatacaaaatattaatgtgaatattataaggctggcaaaattatatgtggtaaatttaagcatatattttttcccatcatattccttagcataaaatttatacgatattaagcttgcaagcgaggcaataattgttcccattcctccgatgtttacaccgactaatatctctttccaagaatttgtgaattttgatagcaaaattgcacaaggaagattactaattaactgactaaaaaatatcgaataaaagtatacacttgtactatttgttaatgctttcttcattaattcatctatagttgtcatattagataaatttcctatcgctatgaaaaggcacacaaaagtaagtaataaaaaatagtctacttccttaaagagctttttttctataacaaaactaataattaaagttattataaaagcaactctataatcaactatattgaaaactgaaagtaatataaaaataaacaaactacaataaataattgcgctttttttatctttaatttctattttatctaaatcatattccaaatttacatttgagatcctgcgattgagaacaaataaccatattgcaccaattatcacaaaaaatattgtatccctaaaaaaatctaacattccaacatcaaaaaaagaaaataaatataagttttgtggatttcccattggagtaagactactaccaatattcacagctaaagtttctaaaattattattttcattgggttaaacttcgctttttgagcaataatcatagtaagcggtacaaaagttattaaagccacatcatttgttataaacattgaagaaaaaaaacatagagatgttaatattaatgaaaccattctaaggtttttatgttttattaatatttcaactgctatcttatctaataattttaacttttcaaatgcaattattactatcataagattaaacattaatattagtacctcaaaatttatatactctattttgggcatagaaatcagagacgtacctagtgccaaaaataatgatatagtaaaaactatttctgtttttaaaattgatatagctttattccaaagctgttttatattcataaattcctcccgacacttatttctagattaactataatcttgttaatcttaagcaaattacaactaaacactcacttttattcacatgctgacgacatacattccaataaaccccataagtgcataattgcatgaaaaagcttgtccgtttgtactagtaacaagttaagtatttcttcttacccctgtatattaatcccagcgaacatactttagtattatagcatattttacaaatataacattacacgattttaaaagagtatttattatttactacgctaaatctttcatataaaagtttctatctctaatgtcataatagctaggcgtcaaataaattaataaaagagctgactatgtattgtttatcagctcttacttaggtattttttatattttatgtttctaattattttatccaacctataattaagaaataaggacaccaatatactccacagaatatctcctaatggataaaagaaatattactttttcttatctttttctattttgtgtctctctacaaaccttcccattaggaatgcaattacgccaactccaatacctgtctgcacgcagaaaagcaggctctccacctctcctggcaattctccaccaatccaagtttccataactggcttaaaccatggcttgtactcagtacctgtaatttcagaaactactttacttcctgcatcgtcagaaccaccaaattcagcgcctcttaatgtgaataatggaataacagcaattaatgccgcaataattagcagaattataactgttttcttagtctttgacattaattttctcctcccttcactaatccaaggcctgttaattcagattttgcatatgtttcaaggccaattataataacaactgtcaaaataccttctataactgcaagtggaacttgagttggtgcaaatactgcaaggaatttagctgccgatacaataaatccgccgttttcagatggatatgtaagtgcaagctggatacttgttacacaataagtgaataaatctccaattgatgcagcaaagaaaatgcctacatatttattaacttttaaagccttacataatctatatattccataggaaacaaatggccctgcaatagccatagaaaatgtattagcacccagagtagtgattcccccatgagcaagcagtattgcctggaaaataagtacaatgattcctaagatactaacagcgcttggcccaaataatattgcaccaagtccagtaccagtcatatgtgaacagcttcctgttactgatggtatctttaaagatgaaagtacaaaaacaaatgctccagccatagccaaaattgtgattgatctacgattttcggacaatgtcttcttaattgataaatagcctatggctatgaatggaacgcaaatagcaccccatataatgcaaaattgtggtggaagataaccttccataatgtgcattgcatttgctgctggagctactccaaatattaaagcaaatgctgccgctaaagcgacaattctcttttcttttttattcatttttctccccctcaataaaactttaatatttctaatattaaagtctaaataataaaataatataaattcctatttgtaatatggctgctttttttatatgcaaaatgatcttatttgcaggaaagttccgtattgcagcatagctgctttatatatatgtgaaatgatcttatttgcagcatagctgctttatatatatgtgtggaaatttctatttttgaagtatttctttaaattcttttatacttttaggatatgattttatatcctttaaaaaatttttttctataagagattcgtaaacttctaacaacgttggttgtttcaaatttgcttgttttaaaatttccatgtttgtaaaaatctctataggtgacccatctgcaatgattttcccctcattaaaaacaagaactctttcagcccatctatatgtaaaatccacatcatgtgtagatattaacattgtctttccttctgtcccaagtttcaataaaacgtcttctaacatcattgcatttaatggatctagagctgctgttggttcatcaaagattataatttctgacttcattgcaataatgtcagcaatacttacacgcttcttttcaccaccacttaaataatgaggtggacgatcctttaaatgagagatattcatatattctagtgcttcatccacccgttttaatacttcatcttttggaagtttcaaattcataggtccaaatccaacttctgctctaactgtagatgcaataatttgattatcagcatcttgaaacactattcctatattttttctaagttcctttaaattctttttatttataacagtatctctataaatgatttttccttgttctggggtaagtaccccatctacatttaagaagaatgtggattttcctgagccgttagaaccaatgacagctattttctcaccttcataaatatctatatttaccccatttaatgcagactttccatttccataatcataatggagatcttcaatttttaatattaattttctcataatcgttcctttctaagcacatgaagatacgtaacaaatttaaaaatcttcttgtatgcagcataacctctctttctaaaaaatgttcttatataaaacatatctacgctttctagataaatgatcttatgtgtaatatagctatcttttttaagaaaatgattctatttgtagcataactaccgtttttcaaagaatgttcttatatgtagcatagctaccttttctaaaaaaaaatgatcttatgtgtagcatagctactttttctaagaaaatgatcgtatatgtagcatagctacctttttttaaggtgtatatttttctttgagctaggcaaggatgcaagtggatttattattttttgaatgtgccttaccttgtaaaacaccaaattaaaaccaaaaacattataaatactgctgctaagacaatctgcataacttctacatttttatcttcctctaaaaatacaaggtccccatcataacatcgtgattccattgcatcataataagcatttgctttcctaagtgaaatgataagcatattgcttgcaatactcccaaatgtatagcatgaagttttaaaatcacaataaccttgacgtgattttgctgagcttttcatttttgtaaatacatccattaagataaatatatagcgataaataagactcattaattctacaataagctttggtacatgtgcctttctaagtacataaataatctcagaagttggagtcgataaggtcatcatctgcagagcacttatagctgcaaaaatcttcaaaattaaaaacaccattttcttaagctgagcagttgaagtaaaaacatagccaaacccaaggtataaattgtactgtcctattggctgctttgaaaaatcaatagcaatagtaaaagtgctgagtaaaataaacgtaattggaattgccaatattgacaggtattcagctgccggaattttccctttaataactgtaagataagccattgcaattatcacggtagcagatacatatggattgttaaatacaatgcaaagaacaagcgtcaaaactgataaatatactttaaattcagcattccaatgtctgatttttgaagcataagcatagaaatcaattgaatatccttctccatgtttatgtctaattttatgattatgatggggaactcccttcctattatcattcatattttgatgtttccatataaatactaataagaaaatagccaccagaaacacagcacataaaataattattttttccatacctcatctccttcgattttctatctatatatgttgcaattcacaatgcacatttcacaattcacaattacagctaaaattcttgcaatacttttataattatgatgaagaattatttttgcaatatatatatttgcttatgtacaaattaacaattaaagtttgctagttatatatgcgtgctatggcataatatgtgatttattatagcttgtctgtaattctcgtatatttttctgcaaaataaaaagtccttctaacaaaagtgttaaaaagacataataacaaaacatatttattcatataaaatatgtaaataaattttcattaaaacgccccctctatcactcgtagagtttagtcacattaaaaagataacaattcgatataatagcttatttactatcatactttatcgtcacatgcacataataatcctctatgagatgcatctatctcatcatctgacgaaaaattatacatcgcttagacttgctattttctttaatgtgccctttggtgcaaaacataggcaggtcttctgacttaagaatcatcatttaaatacgccttccctatttttaagtggcatccaatgtatttaaactcctctaatacagctacgggatagtttaggaatttcacctaattcccttttaattaattaaaaatcattttaaaaattcaattaaattgattttaattaaacctacattttatttataaaatttttctaatttacatttatattcataaccataacatttttagtaaaaaaaatcaattcaattctctattgtatagataaacaatatataacctagatttatgcaataatccaccgagagtaaaaacattgttatttcacaggactatgaagatttcgctgaaagtgctaaattgcaggttgcaccacaggatttagctcaccagaatagtactatatgtagaatggttatctattattgttaaacttctgtatacacttataccagaaatacatatatttttataaccttaagagccataatattcagaaaatgtatgaagatgcatcttatatataaagtataaaataaaagatttatcaaataatattatagaaattaaattaaggagtgattaatatgaaacataacgaaagcattggatgttctgtagcagagtgcaaatatcattgtaaagaagatgattactgcactttagaccaaattaaagtaggtactcatgaatctagtcctaaaagtgtagaatgtactgattgtcagtcttttgaattacactaataaagaatctatattttaactacagattctttttaacctaagaaaataatattattaaattcttactaaaaatagagatagcatttctgggtgttctgctatctctattttttgctatgtaatttttttgcaatgaatttctatcattttatcatactactataaaaagttctatattatctatcaatcaattctttcttaacatattcattaatagtatattcttcaccttcaaatatctctgtcaagtgtagtattatttcttgttcttcttctggaagatctcttattgtatctttgattgtatctatagttacatctttcataaaataaaatcaccaccttgatgttattatgagatattatattacatgaatccaaaataatccatagtataaatactggaaatttgctaatgctataaatgctaatcttttatagcttggcaggttgcctaaagacagtaaattaattaatagtttactgtcttttgttctttttttaggcctgcttaatatacttataatagctgaatatcttttgtatcatatatacctaagggattatatatcatgtataatccctcctcgtaaaaaacttatcaaacatagatttgttaattacatatagataatccaattataagttagatttacaccatgaaatatatcccaactagaaatgggtaatatacttttgtggaatgtttcatttgtaattttgatggatgtgattctttggctataagttgttccaaatgtgctagttcaaagcttgttctttgaggctagcactttgggtgcaactttatagccttagaatcaccatcagaattaaccagaaactggaacaaaagtatgttattcatttcggcgagttatatgcataagttcaggtcttagttgggttatctatatactgccataataaattaagcttactatattaatttattatcttttctattttgtaacatttctcttgttctacaatatattaattaatataattgacattttctcaatgcacattatttcttaaaagaaataaacagaaaatattatcacctttcatgtttatttttttatataaaaagcagtagttggcgacctcctgactactgcttttgtaaataaaaaaagataattcataagtaaaatatatacaaaatcagcaaatacgaacgcctactactcactacaatattatatttatatctaagttaagcccattacatatcatttaatttgctatcacaacaatagagttgtacttcccatccttctaaaggcggatctactacataattttcgtcaacataacttcttataaattgtgcagctctcttctcggcatattttgcatttaaaacattaccttcatcgtccatttcaattacgttagcaaagattgcatatgcttgttccatagcacttggctcttcaaatatacacgaataatcaatcccctctaataatggataacctactgttccatttgcaatccaaaatgaaaaagttcttaatgctccactaaatgaatgacttaattttttcaaaaaaatacctcctccttacacatgattagttcatatcttcattgttcatatagataagcatctttaaaactaaatttatgttgtatcttacagaaatcataaatattttgatttcgaaaagctatgaaagtatgtattcaatttcggctgatatctactatgaataaattataatatagattgtttctttacttgataattaatatattctttgagttttatcttaatttattaaatttttaacctgcattactgttaaacctgttttttctgctatgacttctgcatctaaaatatccataagctttttagctattcttattctttcttccattctcccttgatttttagcttcatttattttatctctttcaaattgtttttcagtctctctacttttccaaaatgatattgcttctgaatcagtactcatatattcaattcccttttgtgttatcttgatttccatctctctcataatcccaaatttgcctttgtattctaacatttcagacttagtgagttctcctatcctccaaaatatatagtcatctgaaattctcatttcactatgtcccattacacttccaacaattcttgcacattttctaaattcattttcagtatacttcaatatatttatatcaaaataatcttcacttacagcttctaccttgccatccttaaaaatacgaagtattgaattattatcctttaatgattcccactgattaattaaatcactatattcttgatattcaattttccttcttatttctatgaatccttttaacctctcagtactaatttctgctgccgctctatatgtacgtataattccataatcctcataaattttttctgaaacattcacaaaatatatattttctatcttatctttcaataattctaaagtatacatcattccacacatatcactgctgcattccccataccatagataaattacttctgtatccttaatgtttgaaatttctttataaaattccttataagcttttttaagataatcaatttcttctaagtaaattctttcatcttctttattaatactatctaaccattctaatctctcgcctaaatttatgccattttggattattccaatagaaatatcatcaggaaacattataactttttttccttcaaataactttttctttttaacagcctgtcttaaacttcctcccgctgattgcgaaaagcatatatgtacaatactctccatactccacctctaataattcaatattaattttaaatatatgtgttgtaatgattaacttacatttaaaagcctaataggtaatgttattattcctatcatgtcagactcttaattaaaataaaaatatacaaagttcacttaaaacatatataatttattttttaatgagaacattaaactgtgttaacaccaataatatcccacgctacttaccatcttttaacacccattccattagattcaaacccgcatttttcaagcatattctgaagaatatatattcttctctggtaatattctaaagaatacatattcttcggaataaatatggtaaagaatattagaaaattctctatcttttgcatatatcctaagtgagctaagtgaaaatcaaaaggtaatcttccaagtattatatcacaagaaataatattccaaaaagtaatactttagaaataatttcttagaagtatttaattacatcaataacactttgatctttgtattttagtgttctgagtatttattgaccataaaataataacgttatataatcaggccatggttaaagtgttattaaaaattagtgtcataagtgaacaaatatactagatatttttaagtactaacttgtggactcttctcttgaatgtgaccatgtgaattaagtttaactgataatattttttataaggagattattatggactatataaaatctaataaagaggcctgggaagaagcatttgaacgccgagcaaaaggttggtctgaggatgtatacgaaagtttacaaaacgaaacctatccattccttaagaaagaattgattgaggaattacttgaatttgattttactaataagacagtaagccaattctgctgtaataatggtagagagttgttatcaataatgaagtttggtgctaaacaaggtgttggttttgatatcgctgaaaacatggtttcatttgccaacgaaactgcaaaaaaagcaaaaactaattgcttgtttatagcaacaaacattcttgatattgatgagaaattcaataatagtttcgattttattttcataactattggtgctttaatatggtttaaagacttgaatttactatttgataaagtgtccctctgcttaaaatctggaggaatattagtaattaacgaaacccacccagttacaaacatgcttgctgcttcaggcgaaaataattatgataaagaagtaccaaacaagctagttaattcctattttaaggaggacccatggatagaaaatagtggtatgtgctacatgagcgaacagtcatacaaatcaaaaactttttatagttattcccatgctttttcggatattgtgaattcattaagttctaacaaaattgttatttcaaaacttcgtgaatttcaatacgatatgtccacatcctttgctaacttaaacaatctcggtatacctctatcgtatattctcatagctaaaaagctagattaaatcattagttttctaatcgattagcaatactatgtaataataaactcttacttttttccagtcgtgactagagacaatagattaaactttctgtattaatttattgtcttttttatgtttgtaacatttctcttactctacagtatattaattaatatactggcattttctccatgccatattaatttttttgatagataaacagaaaatattatcacctttcacttttatttcttagtataaaagcagtagttagaaacctcttaactactgcttcatttattttatttaattataactgtattagtaatttaatgtttttcaattatataatccattgtaactataattttatttgaatatcttaattttaaatattattgtttgattctaacattttttatcttctggtacattagtaggatcttcaattagagtagtgaaaaaataatcatgttgatgtccatctgcaactgttgtcctaccttttactaaatgaatgtgttttccacctggaagataaatagctggaccagtagtgtcacaaatctcgtgaaaatgatcaccaaaagtatctgtaaactcagctactttatggatatgagtctttccatatttaattggaggaccagtcacaccagcaatacgatgattgtgcaattcaccttcatcatcttcttcataatctgtgcttgattcaaattcatgattatgcttttttatcctgtaacttttttcatcataatcctttttatcgttataatcacatttatttttatcgtaattataataattgtttcccattttcttttctccttcgttatttattataaatcattacaatgatactttcctaattttatattatgctaattcacataatttgctattgattttacaaaaaaaatgaaaggtagactaagtatttctacctaatctaccttcactaaacagagtatatgcaatttagtaataattattatataatgctgatttgattcgtagacgattttctatcaataactataattactctatctacatctatattttatattgtagctgttattcttaatttattgcctaagaatttaaaatgaatataaaaccacactagcttcaaacccgcatttttcaagcatattctgaagaatatatattcttctctggtaatattctaaagaatacatattcttaagaataaatatggtaaagaatattagaatattctcttcctaaaaacttaatatcaattaaaatattttgcttcaaaattaattctttatatcacatgagctatgatgaattatactatttcttatttataatcctcactcattttttctaaatttttctttcgataaaagatatatattgaataaaattcctagcgctccaataactcctgatagaatatatatcaaatcacttgttttttcccatatgataaccgaactaattattatacatataaatacaacgcataaaactgaaacgactatgtttataatactattattcaaagaatttttgttagacacaataagtcatcctcccaaaaataataagattgtctaaaattattataatgataatgccaatataccaaaatcattaatataaatgtgatattgtttatagggccatcaataagaaccgaacttatgctactctccgccgaaaaattcataatcctatttgatccatcggacttatgaaattttcactgtaatgatctaaattagagcatgccagtatttttgcatgccctaaatatctaattgctttttcatatttcaaatcctatcttatcctcttctgtaatttctctaattactttacatggtacacctgcagcaattacattggctggaatgctttttgtaacaacgctaccagatcctataattgtattatctccaattgttaccccttgatttatattaacgcctgctccaatccatacattgctgcctatgtttacaggttttgcataacaacctcctgctactcgttcttttgcatatgttgcatgattagatgtataaattccaactcttggaccaaataaaacattattccctatgtttatccctccaccatctaacattacgcaatcgaaattggcataaaaattatctccaattgtaatattaaaaccaaattcacatcgaaatgttggttcaaagtggactcctcttccaatacccttcagtaacctttttaatatttcttctctttcatgctgaggcttaccaaaactattattatattcatttgtaagaaatacagttttttctcttgcctcaatcaattctgttgtcaaatcattatacattttaccagataaaattaattgtctctgttcttctaaattcataataccctccaaccatactttaggatttttttaatattcttaattatcaaataacaagctagctaaatgctttgcttgcttcccaccgatcttaagtcccttgacacagtaatgacagtaagcgaccactttatcagtagtaatattttggcaatgttcacgcatcaacctctcttgctcttcacttgtgctaggaataaattttccatctgcattttcaacaaatcgtttcggtgctaacttcaaatttcgttttggtgctggtgcatgcaaagatactccgcagaactgtgttttttcatagttctcatcttgctccacaatatctacattcattttcttcaataacccacggacagcatcttgctctgaacggttatcataagagcgccaacaatcttgtaatgtcattttttcatgtgaataatctgggaacttaaattcttcatcattcaaaataagttcccaaagcgaaatcctcttcacttccttcatagtttcctgaaaaatagcagcacaattatgacaaacatataccattgtactatcctcagaaaactccttataatgtggaatagctctccaacgtggttgcatccattccggcatatcagccgtaaattcctcgaccttataatttcgaacacagcaccttataataggcatatcaaatcgatgttttaaatagtcttgaatttttgtgctaagttctggttcttctcttgtaaaagcacaacttgccacataagtatagttttcagtattcataataaaatcccctccatttattgaaacactcttgattatatttgataataacaaaacttaacaattctaaaattgcactaatttcattattaaaaccaaatgactctaaatcttattatctctcaaattttattatatagcattgctccccatattaagtaaattataacatatattattttttatgaaatacatcctataatgattaatttaccaaagtgatttctcttttgattagaatatttttcaacctatcaatctagaaatacaacttacaaggctagctttgcatctcacttcaaatctattgaatagagaaatttgctgacatatactataaatataaagcaaggagggacatggaaatgaaaattattattgaaaatatccctgctggatcggaaccagaaataataataaaatgtaacgagcctgacgaatcattactacaattaatttattctctcaaatcatcttcaaaaaagcttattggatttacagatttacaaatgcatattatcaatcctaaagatgtattttattttgaatctgtagataataaagtcttcatctactgtaagcaaaaaattttccaatcaagacttaagctctacgaaattgagtctgaatatgagaacagtgatttttttagagcatcaaagtcaacaattattaatatttctaaaatagaatctgtcagcccaattttctatggcaaatttgaagcattactacaaaatggagaaaagatgttcatttcaagacaatatgttcctgtatttaagaaaaaattaggattataaataaggaggttatactatgaaatttattggttatttaaaaaattctttaaaagatttctttatatctagcggattcctaatgatccttattacaacgatttcagcgatttattcaaaggaaacaattgaaacttcacaactttttcaaattatgttattctcattggcgtatgtatttttcaaattggcttttataaacaaaaacgatattaataaaaaagttcgactaattacttttaatgttttcttaactctctcagaattaatgattttattatggctgttgttttttagcccaggtaaggttatgaatattaatttacttctagcatatatctttgcattagttatagtaaaatttttagtttatactatgatgagcataaatggtgaaaaggaagcaaagcttataaatgaaaaactaattaaatataaaagcgaaaaagattaataatatttttattattcatgtatattattttaaaattatgctaataattaaaatacgtttcctattttcaataaataaagagatagccttattatcattcacatgatcttatgctatctcttatttttgttatttagtaaatttactaaacaataaatattcttttaacaattaacggcaattaatatttcttacacaatctaaagctttttgctttgtgttttcgcatgcttcccttgctccctgctcgtatcctttgcagtatccatcttcacgtccagcttctacaccatcacaataccctttattacgtccttgattatacgcatcttccaatgcatcttttccagggtaatccattcttggacagcactcggcatcgtcgctaagagttccttcgcaattaatagtatacattattccaagatcatcacaatcacagcactctttgttactcatctttttctcctccgtaatgaataataaaattaaacatttatatttaacagtgtaaatttatttttatatctatttcttcatagcatagttacactatcattaagttatagtacataagaatctctctacaattccatactatgtattaatttatgatttgctataaaagaaataatgaaaatattaattatcttactaatttttatcacatttttattgccggataatatactaatggagtggatatattttcattattaattcttaatctcatactaatgtatgatatagaacattgtgtttcctaaaagacaaaagcagtagttaggacctccctctctactgctttactaagttttatcacgagaagtgatatatatacataaaaataagcagtagtcaggttgcccatttctactgcttattttattagaattcctcataaactctaggatcttgattagttgtacgaccatcttcacgagaaagtccagaaatgattttcatttcatcttctgataattcaaaatcaaaaatatttagattatctaattgatgctcttttgatgatgcttttggaagtggaattgcccctaattgtatatgccaacgtaaaattacttgtgaaatagattttttatgtgcttcagtaattccagcaattttctcgtcttttaacatactattacctcttccaagagggctccaagattctgtaagtataccatgttctttattacaagcacgttgctcttcttgattaaaataaggatgaagctcaatttgattaatactgggagctacaccagtttcttttattaaagtctgtaaatgttctggcatgaaattgcaaacacctattgatctaattaagcctcttttctttaattcaatcattgcctgccaagcttcaacatataaattaattcttggattaggccaatgaataagatataaatcataataatctaatccagccctaaataatgactcttcaactgtattaatagcttctttatatgagtgatgacgaccaggtaatttagaagtaattataagcctttctcttgaaacagagcatttccttactgcttctccaactgcgccttcattttcataattaaatgctgaatcaattaatctatatcctaaatcaattgcctctttgatgctattagctccttctataccatttagactgtatgtcccaaacccaatgcttggcactttaagcccatcatttaatgaatattctgtaatgttctctaccataaattatcaatctcctttaagtttacaatattctcataaaatttaataacagcttgtattgtatctttattttaacgtttactttattatagcatatctttgattctttacaaaaaaatggagagcctaaaattattttcacgccattgagattattttatatctatatttctaatatccatgtagattttatttttggcactgctagcataataaaaatatttctttagttttaggtttacatattattaaattattctcttatatattatgaaaacaaaaataaaggagtgattcacttggatcaaatggtattaaaaacccaacaatggttaaatggaatttacaaggataattctaattacaaaataattcctgaggatggggctactggctggacaacaataacagcactaacaactgctctgcagattgaacttggtatatctacccctaacggaagctttggccccgcaacaagaagtgcatttgaaaatttatcaattgactctcagccacaaaatgactggtctgaatccgctattatatcttatcagcataaaatatttattctccaaggagcattattctgcaaaggatataatcccggcggatttactggtacatttggtacaaatacagaagctgctataaaacaacttcaaactgatgctggattatctaatgcaaatggtgttgttgatagtattttaatgaaagctttattatctatggatgcttttcaaatgcttacttatggtgaatataaggacaaatgtgatcaaaaaatacgtactattcaacaatacttaaacaaaaattatatttcaaatacttcttttagtatagatataggcttagtaccatgcaatggaatttatgaccgttctactaataaagccttaatttatgctctgcagattgaggaaggcatttctacaccaaatggagtatttggaccttcaactaaaagtaaatgtcctgttttatcattgggaagtactaaaactaaatttatatatttactacagtttgctttatattgtaacggtaaagaatttgatcctaatggatttgatggtggttatggaaatggagttaaaaatgcagttacaaagttccaaagtttttgcggcttaaatgctgatggaattgctggaagccaaacctttgcatcactgcttgtaagtactggagataacactagaaaaggtactgcctgcgattgttcaactactattacagacgcaattgcagctactcttaaagctaataaatatgaagtagttggcagatatcttactggaaaatttagaatgacctcatctgaattaaaaattatatttgataatggattaagagttattccaatctttgaagttggaggatacaaattaagttatttttcgtatgaccaaggtgtctccgatgcagactcagctatatttactgcagcccaattaggttttactaaagatacaataatatattttgctgttgattttgatgcactagattctgatgtaacatctaatgtattaccttattttaaagcaataagcgaaaaattcactaacgcaaattccatctataaaataggtatatatgcacctagaaatgtatgcagcagagtgcaaaatgccggttattcttgcagtagtttcgtatgtgatatgtctactggctttagtggaaatcttggatatccacttccaaaagattgggcatttgaccaaatttcaaccgttactttacatggcaatgcagatattgaaattgataataatatttcttctggaaagaatccaggtgttaatagcgtagttccagtcgatatcttaggagcacttaatgataacagttttgcaaaactatttggcgttgaattctcaacccctgatgcagaaatagaaatatttaataatgcatttgttaaaatcgctataggagcagcagtaaaagctgccttaggagatgactcaaaagttataaaatttaaaggtggtgaatttgatggtgccgatatacaaacgcctcttgataatcttaaagcatctttaaataaagataacattgaattgtcaacaattcttgcaaaagcaaaagatatggaactatcaattaaaacatcaactaatggtactagtttaaagattgagcttgaaaattcatttaacgtgcctgaacatgatacattttctctttcagaaactttatcaattgaatttagagtagataaagataaattgcttgaagatcttaaacttgctacaagcagcgtagttgattttgttaaagaaaatcccgctataggtgtcataatatgcattgcagttgttgctgctatattacttgcacttcctgaaacagctttaggtgctgcaattatatctgctttttcagaagcaattgaagcaatttcggcagtcattgcaattgcataactttactttataaaatatcaaaaacctcctcaaaattgaggaggttttatagaatttaaaactaaaccgaatcaggataactatattttaactctaaatttgtattcttaataatagtatctaaaaacaacttcttatcgtccattgaagaaaacgacaatataggtattactaaactttcaccattcattgtaggtataaaaatatattgttctaataaatacaaaccttttatggagttccaattatgaattttctctgaaaatctagtattagtttttattcctttttctataaattttaaatgcgttgtctcaaatgtatctgttaatttatttgttccatatattcttagaaatcttcttcttaatgatctgttaaatattttttttctaaaaaagaagaatataatgtacataataataatagttacagtgtataaagtacttctaagtaaaatcatcaatccaagcagtataaaaaaagcaagtacagcatatgcacgaatttgctgtttataagtttttgtgttaacaatatacttcatattaaaaactattaattcatcctttgaaattttaaactctatctccataatacctcctattttgtggcttattctaatcttaaaagtattagattaaatttatttatttaaaacaatcttcatattatcttttaaattagttttgtctacttcaactaaaataacccacttccatgtgccatcaaatccttctatgccatcaacttgtgcaactgatgatggttttaagtttactgttaaagtattattgcctacatttatactttcaacactatatccttgtactgaactagttacggaaggcatttgtaagtataaaattgccatttctttatcaggtgatttcactggaatttctcttggtgtaaaatatttatctttaaacctttgaaactctttattagtcaacattagaatcgtatcttgctgaatatcttgttcttcatcagttttactaagcccaattacattagaataaaattctttaaatgctacatttttatttgtcgagcatgcaatcaaaaattgaaacataattatggtagtaaagattaaaagcaaaactcttttcatattatactcccacccctattaatttcatttttatatctatgaaaatgattcagaaaatgtagacatagcatatatgcataccccaaaaacaattacacttataatacccattgaataaaaaatcactttccatattttactctcattcaactacttccctccagtataaaaatctataattagtaatattaattactatctgaaccaaatttctattccatataataattattataacatatatttcaaaccaccacataaactgctcatatcatagctctctacgatccttttactaaggacatatcagaaaagtacaaaaaaatagagggcacaagattactctcatgccctttaaactattttatatcataaaaccaacatcctaacgtatcttttaattccaaacatttgctcataggcaaattttgagtttcaacccaaattcccttttcatttgaattagcatagatacgaatatcttcaaaatattcttgcacatattccatgtcaactccagcaaaacttccatcccctctatatccaattggaagataattagttcttacatatccattagttttattaattattccatcattaaactcattcatatcgcaatcagtatctataccatttacacatcctgtttcagaatattggtggcccactctattagcaaagaaattagaatttaatttccatggattattattataatttgcctcccatagtggataaccagcaattctatcatccaagttatctgtaaaactagtataagtataaataccaatttgcatatttgatatctctttaaatttagcaataaatcttaatacaaagtccattaatccatcaaaattactttctacatctaacattggaattagatcatttgctttatcctttatagcattatagaaactattagcctgagtttctggctcgctagtcccaaccaagaaatgataaaatcctgtttttaatccttcgcaatgtgcattggaataattaacctctaaacatcgatctttgaatgttgtaccttctgtagctttaatgtaaacagcttctattcctgaatctttcacctgtccaaaatttatgcttccattatgattacttacgtctatgcctttcatatataccatcctttctactacacctcttttattagttatttttatataataaaaacacctactttttgatatgctccctttataatagtcagttaaaataataaacttgacagtatgaagggataatatcatttccgtaaatgtttttagttcatctactattatagatgatttcaatattaattttttatagatattatttaggatttctaaaatttttctattaattttattttgctccaagtgaataatttatttatttaatgctgtttatctatgaattgttttactgatataattctaatgatatatttatattaacaataattttcagctttttgtaacgaaatctttttttaatagtcatatatataaatactaaaaatctacctaaatctttgaatgatcattttaagatttatattgtaaaaggggaggcagatggaaaaaatgaaacttgggctagagttacatttcatcgtgcaaaactaatgttacaaaaaagcctgaaggagatgaaaatatgaaatgtgaagtaattatggacttgttacctgcatacatcgataatacatgcagtcccgaaagcaaacttcttgtagaagagcatttacatgattgtgcacagtgtagcaaactttttaaagatgctacagaaaatgttgaggtcaaaagttatgatgatagttacacttatgctaatctccaagagaaagatttattactgaatgctaaaaagaatatacgctttgagaccataaaaaaaatatttaaagttatatatactgtgattattggtcttaatatattaggaataattgctggatatctttctattaaaataggttatgatttagaatatccaagattctattttggaagtttaggaattaaaacatatagtatcttatttattatatttatgctgcctttattttgcagtattttaggaaaaattattttaagtaagataaattatattaaatcatacggatggaaaattatattaaatgttttagctttattaatttctatcatgttaagtttggctagtggatttatgttagtttttgtaactccaccattagagtcgtatacaaattcacctaagaattacttacatgttggtaatgatatgcgtaaatatgaagccatttataagaatttcttccctgaaaaagtacccgatgatgctgaaaatattgaatattcctacagaaaatataacggattatttgaaacaacaagtaaaatttcagcttcttggtcgctcccagaaaaatcttatgaatactataaacaattaattgaaaaagattcaacaatgaatgaaattgaagctaataaatatgaaatatctttgcctggttatacttatccccctaacttaaaattaaattttgaatttaatgatgagaaaaaagaactaaaatatactgcaataattgaaaagaagtaataagcttatcattaatagttagtttaggaaataagatcttcgaaaaatcaaagagtctacagtaaaatgctgtagactctattttgggtattttatatacatgaatatgactattgattataatattattatatatgttgcgattcacaagccacattccccttgaagttttcaattttacaacaaatatttccgaggaaataccttttcccaaaatcattatgatatatacttttccatcttagtagctgcctgcttttctagctgttttatcctttgataagatagctttaatttttcctgaacgacataatattttctatgttctatatgaacaatttttataatgtcgctttcttcttctgtcaatatagtaagcgcattttctatcctttttaattctcttttcttatttgcttgctccttatataaagcttcttttctttccattaacttttctgcttgctgctccacacttgaagtaatcttataagtttttcctgttctttctcccatctctattccacttattcctatgatttcttcctcaagctcctgaactcttatttctatatcttgtatgtctgctaaaatctctctatatcttcttactttatctattgtactgttcatattaaccacccctagtttctaaatttctaaaaataagcaaaattcattttgtatataataggtctccacatttaaaatttgatacatgtttgtaacctcaaagttcatactatgaagtaggcattttaaaataagctgcttggattcttaacgagaagttgttccatttactgcttgtcacattgaaagtatgaacatgcagtaataagtgtaaccttcaatttaaacatttcagcgaaattttcatagctttatagaacaagtatatattcaatttcggttgagatttatgtaaatttgattttgaacactatattatttcaacatatatggctagattaatttagctcaagagaaatggggaatgatgccacaattttggttattaaaaaccattacaatgatgcatttatatgttatgatttaattgtaatcattcccaattccttgtttgcagagtgatattcatatatatcactcctccttactcattagccttcttacttactaatctttcaaagtttccttatacatctccacaaaatagatctcaatttaatcaagttttatattcacactatgatttatagataacacaattataagttagatttatgctatgaaatatatcccaactagaaatgagtaatatacttttgtggaatatttcattggcaattttgatggatgtgattctttggctataagttgttccaaatgtgctagttcaaagcttgttctttgaggctagcactttgggtgcaactttatagccttagaatcccccatcataattacccagaaactggaacaaaagtatgttattcatctcggcgagttatatgcataaattcaggtgttagttggattatctataaataaaactatttatcattttctactggtatgaagtttgcatctaacctaaacattaataaataaaatcaccacgtaagtccattttataaactattaagttcagctctaatccattttaatttattctttattaattctatttctattcttaaattatctattccatctaagcatgtaaaataagcattttctgctacatctctttgaagtcttaattctgcaacctctttatttcctttgactaattccattattaaggtagctgggtatttatcttccctaagttttaatatttcctcagcttgttttactttatattctttctctgcctgagcctttttaagccccaaagtttttaactgtgtattgctcctgtttaatgctatgatgcatgtatttaatctttgtataattccttttgaatccatattatttctcccctcaactttattaattaaaaccttattcttgatattttcatcatttttacttatttcattattttcataacctaatgaattaatttcttttattagatcaaaatcattttcgcactctaaatctttgtttccatctgcatagctatattcacctttcaaaacctctccccccatcaactcagcacttttcttctctaagagtttatttaccttatctccaaattcagcatgttttttaaaaattatttttcctggcatattgctgctttttaagcatatgcaccaatgtatattggacatattctcacctcagtctataattattttccgtgccttgaatttcaactataaaatccttggtcatttcatatattctacttcctattgcttcatcaaaatttagcagtctttcaactgtgaactcacttgaaacaataactggcaagtgattaaaatacctataatttatcagttcaaacattatatttatgtctgtttcattaacttttcctttatataaatcatcaattaatagaatttcgcaggtttgatatttgcttaaggtctttttataatattctttgtctaggatattttgtttaaggcttgtaattacatctctataaggcatgtaaacaacttttatattatttttcaaaaagttatttgcaagagctaaggcaatatgagtctttccacttcctggattaccgcaaagtagaattgaatttttcctatttgatcttatctcgtcaaaactcatataataatctgttgcaataaatttcatttttttagaagttcttgaccattcttcaaaattgctaaaggtcttttctaaattttctgggtttatcccactatttttctatagccttttgacattttcaatctctaagcacgaacatggtgtcatcagtggctgtgcatgaaactgagcttttataatataacctgtatctttacatttttcacatttaaaatggcctgtctcttgtgcagcctgcacctgcttttggtttccgttctgggattttaatattgaattttctctcacctgatttaatattctttgaagagcctccataaatatacttttcctccttcaatggatataatccctgccaacaatgctctatgctgttttctaaaatcttaatttgtgtttcttcgtcttgagataaatcttttagtttattcaataatatttttaatttcttatccgttattggttttttaattctttctctcatttttataaattctaatatactttcaattagcagcttatttttagtaaattcttctataagtacattattcttatgattattatagtttttattattcttgttagttgttaactctttgtcagctgtttgtgatatgcttgttaattcactgctagaatgactgctatttttctcttgctttccttggtaaagttcccagtttactatctttataagtcttccagtatttgttacctcttgtgttaaaaaatcatatctttcaaatttcttaagggcagttcttacattttgaagtgatataccatcaccacttttcttaactattccctccagggaagttacaaattgacctgcttctgctttaaactttattcctttccattcccactctcttttttcatgatttgccatacttagaatcgtaatcaatataaccttctgctctaaagttgaatttaaccaaatagccttttcaaataaaactctatgaatcttaaaccagccctcgctcatcttatcaactcctataccatcttatagctttcgtattctttatatatcatcttacatctacttctcttcccttatcgcacatccaaaaggaatcatattcatatgtggcacattttaaaccttctaactcttcgttatcttcttcgtaatcaaagctctttaattcaatagaatctgctttgcatactccatctttataatttttacaggttctccagttacacttaattaacaatttgaattccccctgacataaaatatctatctcgataacttttgtttttcacctcttctaatgcactcataaattttgatgaatcttttattgtctaccctgttatctttaaatctctaaatatgtcatctgttgagcatttataaatatctgcaagtctttttatcagtgctggcgatggtcttgtccacccttgctctaacttataaaatgtacttttacttatttttaatgcttctataacctcctcactatcaagaccagagtttaatcttcttaatcttattggtgttaatttcatatattctcccccattcaatcgactttcttagctgcttgtctgtcttactatacttatattttatcagtttttccgataaaaccaaagcccgtttctatcgtcaataatgatatttttatcaattatatcagtcatgcttatattttctctttttcccttaatcttcctaattaatttatcagtatatatgataaatatgtaaaattaataagggctagatattctctagcccttattaattctttaattatctttatttttataaacttcttccacttaaccatttatataattgtcttttaaaattcaaaagttttatacttttcaagcaaagaacaaaatcgcaggcaaatatgtttaagttccgtattgtgcttcgcactcttttcataggtgtagatttcttttttattctttttaaaatacaaaaactagtcaatcaaccttttttaagttataccctcaaggagtacctcatccatagattttattggaatataaattcctaaaaaataaaaaacagcctacatatttaatgtaagctgtcagactctgtataatatgacggcaattcatatccttgccttataccaaaatctcaggcgacatggactttttatcatttttatattccttacaatccaaaattaaaattgatactcgcctgaaaataaagtatgtatatatgttacaatttacaatccacatttcacaattcacaatcacagataaaattcttgtaatatttttagaattatgatgaagagttattttttcaacgtatgtattttatatatttacatgggttcttttatataaaactggtattgccaatgctataaggagtatccccataaaagcaggtgctgaatgaccaagtgatacatagatttgtccaccaatgataggtccaatcattcttgctaaagcctgaatagattgactgcctccttgaatccttccttgttcactggaatccacagacttggaaatcatcccattgaatgaaggtccaaagattgaatcaccaaaaccgaatataaacattccaatgataaagaggggataaaataataacaaagccgatagagcaataaaagcatatcccataatctccgaacccatgccgagaatcgctatttgtttatcattaagttttagcaaaagctttggcattataaggctctgcgaaataatatcttgaaaacccataattgaaaacatgagtccgattactgtaggcttccagctaaaagtatctattgtaaattgtgaaaatactgcttgcaaagatccgtttggtatccaaagtaagaatcctgatataagtaacatctttatacttttcatagaaagtatgctggcaagctgtgtaaatggatttagtctcacaaaagtgatcttctctagtctatcttcattgtgaagactttcaggcataaaaaagattccataaacaacatttagtaacgttattattgccccaaaatacattggcacagaataaccaaacttagcaagtaatccacctagcgttggaccaatgacagtacctacacctacaatagcgctcacccagccaaagtatttagttctctgattactaggaattatgtctgcaaaatatgcaaaaatagtacttatagtcccacctgttataccatctattatacgcccggcaaatagtatccataaggcgcctcctataccaaagactacgtacccgattgctgaacccaatagacatactaagagtactggacgacgtccatatctatcgctcaaagcgccaagacctggagctgctaaaaacacacaaactgcataaacagatgtaagaagtgtaacaactatagcttgctctcctggattgcttgtataaggctgaactaagaatggaacgactggtgctatgatcgtaaagcctattccacaaagaaatacagatataagaccgaatattaaagcatgtttatctataatttgttctgagttttgttcattatttgatttaaatttggacatttaaaccctcctatcaatatttgttattttgtaaagatttatgagtgatgttgatataaactgagtgaatcctactgctaatagttgttattttgtttcattaagaactattattaccgtgtaacaaattgggtatttttgaccatccctccaaaatggaggaatgagcaaagatacctagtatccttattacttcgagatcccttccgaaacaattgtttttcctacatcttttaacataatgttaagatcttctctttcatttgctggtccatttctcaaaccagtaacaaccggtacctctgtaacatcaaattcaagcagctcaaacatgtgcttagtataatcaatatacgacttgaatagctcaggatctggatttccctgattaaacgtaagaattagtcttttttcagctgcgctttcttccttgaaatatggagagtatcgtggagaaaatcgtgcaaacatcctgtcaatgatgatctttccttgagcactcatctgcatcatataaatcggcgaaccgaaaacaatgacatttgcacggtcaattgcatcattaagtttttgcatatcatccttgataacacacccctgatcacctttatggcaggcccaacatccttgacatggtttgatatcaagattattgaaatcaaagaattgagtttcagcaccttgttctttcgcaccttcgagtattttatttactatccaggcagtattcccttcttttcgtgaactagcactaattccgattatattcatactttttcctccttgcatatcttttatatctataatttgttttgtactttctgatttcattttaaattctcctttagtagcagatacttttttgtttacctctcaacaaaattatcttaacattattttgtttacctgtcaacaaaatattagcaataaaaacgcagcctattacaaatagttttaggctgcctgttgttttattatagataaacaatttaagaattaaacttattagatgaacatatttacaaagtcgctaaaactttgagttcatatctgcactagaaatcataaatatatttgtgtagaaaacatttgaaaatgagctgttaaaggttcttagctgtaggttgttccattttagcttgtcaaacttaaagttggagcatgctaaagtggatacaacctgctgcttagaaccttcagcgatattttcatagcttttcggaatcaaaatatttatgatttcggcaagttatatgcataagttcaggtctctaaagtgcattagaactagtttcttgttctttaacggaactttgctttccttgaagcagttttgctgcaatagccgatacaattggaactgtaagtataactgctaagctcccgcaaacagcattaagaatatcaattgcaacaccgtttgagttaatcaattgcctaaactgtacttgataagagtacattaaaataaaagagaaaatggattcacctaagaatgctagaataagagtattactcatagtccccatcatatctcgtccaatattcatacctgaactgaataattcactaaaggaagcctcctgattttgcttctttagttcattgattgaggtagcaatagaaatagcaatatccattacagctccaagtgaagcaataataatacctgtaaataaaagatctttcacttgcagcttgctttgtccagcaatgttaagcaatgcatctgtatctgaagatgtataaccagatatacctagaatcctactaaaaataagcataattacaactgatacaacaacacctgccactgttcctaatacggcagacaaagtttttctatcaaagccacctactaaaaagagggttacgcaagaagttacaatgacaagtaatatagttgccaagacatcagacacacccatgaaaagtaatggaacaaaaataaataataccgtggtcaaggtaaatattatccctagcacagaatgaaaaccacgccatccacctactaagcaaattgctccaataaaaaggcctataagtacaagtaaaggaacaacacgatatggtgaaaacatataaacatttacgtatgatttatcatcagtagatgtattaacagacaccacaatatcctgtccattatgaagaataaaattagtatcataattaagggcattattaaccttaaaagtctgtcctctatattgcccactttctataagtacatctacaatttgtcttccaatgtaaagcccagaaaaccctgatgaatttattacctgctcatcaattgagagaaccttacccttttcataatgtacttctccaccagctcctgaactaaatggattataaataggcgtatgtgagctaaaaagtatagccagtataatgtaaacagacaaaatggcaatagatccaataattttgccccctattttaatagatgaaatccaacctaattttatattcataatattcatgctattctcctacttctatactgccttataaaaagcagtttaattttatatgacaaacagtccagtcaatataaactgaacttttgtcttttactaagttatgcttatttattatttctttgtaatagtgtagctatcaattaatgattgattaccaattgtataatcatttgctgcataagtattgattgtaaatgtatcatcagtgaaacttacatatgagtacgatggaacatacccctgccatccaacaacactaaatgaatggtcagcacttccgccaactgtatcattattacccttgttgaagtcataatatttacttcctgtacctgaatcaagagtaaagtaaactgttcccttaggattagttacactgtctggatattctttttttgcataagtagcatttggatttgtagtacctggtacagaagcgtcgctactattttttaaagtttcaggagcaccactattaggatcaacagcacttccatttaacatttgtgcagtacgagtatagtagtgatcatgtccttgtagcacaacatctatattgtatttatccatcatttttgtccaagtattacgtattgttaaaactggatcatcaagttcatttttagtattgtgattagcttcgctgtatgcagattggtgccatgtagcaaccttccactttacatttggattagctttaatagcctctgctataaattggtcatgatcagcagtaccatagttatttgcattcaatactaaaaataatactggaccagcagtaaaccaatagtcaccatcatttccatattgcgtagcacctaacttacttatattaggctgattgtagtgatagccataatattcacccatttgatgatcatgattaccacaaaaagcagctaaaggcatgttttgcatgtaattcactgtagaatcaggattaaagaagtccctatattgataccattgtccatcagatgaatttgaaggttgaactaagtaattatagtcgttaatttgatctcccattgaaaaaaggaagtttaagtccttattttgagtcactagtttcagcatattattccagcctgttttatcatcatttaagttcttgtgaccacctgtagcattagatttagcagtacctttagaattatcaaatgcaccaatttgtggatcaccaaaagcagcaaacgttactttatctgtaggtagtgtggtaattgtataaattggactccaattgccttgtccatcacttacagaataagagtactgtgtatctggatctaacccttttactttcgctttatttgaatattcaccagttggagcacctgctgttttcttcccattataaacatcatccccattattagcaggagtagcctttccatcaatatctgtaagggctgtctcactctgattaatagattgtgtagcttttacaacagtttgttccgcatcctgaatatctgcagaagttggaaattctgtaccattcatattagatgtacgtgaaatttttatttgtgtctttccagaagattgtgtgaaccaagcaaaatcaagctcttttggatcagaaccaacatttgcattaatattataaggtcctgtaaccttaggtaatgagaaattttcaatacctgatataccagtaatttcggcattaacgttccttataaaaggtatactggcagacgtagccatgactgtagctacagcaattggaagcatgaatttaactttcttactaattttcatataatcttaccaccttctaaatattttgttcttatataaagttactccttttattttaaataccagttaacttatagttaatttcattttaaatattatattttacctaaaattacatatttttactgacattacgttggtaagactacgttacatacaattttattacaaaggaattatgaaatctctggtacaagccacacaaaattttaacaataatagataatcattctagctataaatctaatttatagtttttatatctatatagataaattaattataatgagaccgctgaaaaagtcctcatatttttgtacaaattctttgtcaaaatgagtaaaacaccagaagctcttctaatagccttataacaacttttcagaatgactaacctataaaagtgtgcaatattcccaaattagtaatacttttttgtctttcattgcctcattgtaagctagatttacactatgaaatatataccaaatagaaaacagaaacatttttatgtagcaggcatttgaaaataagctgctaaaagttcttaattgtaggttgttccactaatgcttgtcacaatgaaattgggagcaagcattagtgatgcaaccttcaatttagcactttcagcgatattttcgtagtcctgcgaaataacaatgtttctgctttcggtgtagtatcccataagtctgtttatctatattgaaagaaataaaaatacagcccattccaaatggaattaggctgcttatagttttattttaattattcggatttatcagacttagaatctattccaagtttatttatttctgcgtccaaatgcctgctatatttttctatgaagccaagcatagcgtcaaattgttcatcagtcacatgctcaaatacgactttatctcgatcttgaaactctttatgcagcttttcatggaggtcataaactttttgcccttgttcagtgagcctaaaatagatttctttcttattatctggtttctgatagctttctataatgcctctttgtataagcttctttgtcattttacttatagctcccctagtcatataaagagactctgcaagttttgtcacgttggactctacgtttcttccaatacattcaatgtaatgtacttctgatgggttatatcccttaagactatcttccatcttaagtttattaagccaagccatcttattaaatactttcctaaaatccattaagacctgttcttgtttgttcatggcctatcctcccactttttgacgcattaacaatattatattactcttttgtttccatttcaacaatatcaaaataatattttagaaattgaactatacgtaaaaagttactcttaaaattagattcttagttctcagaatcaccaattatctctagcaactcacatggcttgtctataatgtaatcagcacctttttcctttagaagctctctatctctaaatccccaggttacgcctacacatttaactccagcatttctagctgtttttacatctacttctgaatcgccaacatatatagctttatcatcagtagaatctaactcctttaaagctttaattactgtatcaggggctggttttttagcaatatttgaactttctccaattgcaacttttatatattgttcaaaataaatcttattaagctcttttactgctgcatcaaatttattagaaacaattgcaagcttatagttttcctttgataaaacatctaaaagccccatgattccttcatatgctttagttttattttgcatattttttgaataatgattccgaaaatctgcaagacattctttataataagcattatttaaaccatcaggcacagaaagctccattaaacgcccaactccgtttcctacaaaacttctaacttcttccttttttctagatggaaaattatattttcctaatgcaaaattcacgctatcagcaagatcttcaagagtgtcaagaagcgttccatccaaatcaaatataactgtatcatatttcttcataaatagtatctccttaaaagacatataaatttttatttacaacttattgttagttaattataacaaaaagcaattagaaatagaattatacattgaaaaaacatatataaacaaagataaaagaggtaatttacatttttgcgtattacctcttttatctttatattttactattctcttttaacctcataaaatacaccttcatcaaaataaagtaaagtattattgtccttgatgaataaagttattttatctgatacatttaattgcataatagaatcagtactaacacctatttttgaaagattggtcttatactcactcgccatattattttgagttttgtttgtcatattatattgtggattattataaaattcattaccaaaggtcgctaagttatttgacaaactaatctttaaacctattagtgatgttttttcaccaacagatacctttgcatatcctgctacttttttgatttcccaattaccataaaatgatttttcatcattactagtttctttatcattgttttgtgaactagaattattattcgtgctattatcgtttttctccactgcaatatttgtatctttgctatcagtagatgagctagcagtcttatttgtttcagtattattatctgtattttttgaatcactgttgctagtggtattatcactagtatctgtagtagcctcagtagttgtatcattattggtttggttagcattattttgtggtttttgatttccacaaccacttaatgttactaatatagctgctactgataaaataatttttatctttttcaaatttattctccttattggattaacttgttgtattttaatacgaacatattttaacataaacatacacggcttacaatttttatatttactctaaattgtaaaatgcgcttttgcaataatattataaagtgtacattatagaaataaccttcggaatctctgcagattatttttatctctccaaacatctatctttaattttctttctaataattttatgataatatattttctttttagctgcataatcagctagtctatatcagttatttaactaactataaacttattatagtaaaccagaaagattaatgaaaattcatctagttcaatatctgatattattttttgaatttcaactattttatcattattacagataatctttttagcaaatttaagataacagatgaaaacataagtctcatatatactatctcataatataattcagtttctatgatatcgccagtttcattttatcaatataaccgttaaaattaatatatgtcatgacattagctttatttaataggaaataagcaagcctaaataaatcgcttggaggttagaatatggatatagacttattagaaaaacttataatttttcagaaaaataaaaataattttatggaaatcttatcttattttaattcaaagataaaatacctaatctataaactaaaatatcccgaagctgaaacagaccttatcatatttctttatgaattaattacaaagataaattttgataaatttgtttctggcgcagatgcttcaatgtatataaaaagatgtcttagaaatcaagcaattagattatcatataaagtcaatcgtgataataatctcctcacctttaattgtgatgatgaatcattagaatcatttaatgaaaataattctaatgattattcagatgtattcttcaatgatttaatttcatcattaaaacctagacaaaaacaaattgtttattataaattctatctgcagctttcagatattgaaattggtaaaattcttaaaatatctagacaatctgtaaatacagctaaaagagtttctttaaatctactaaaaactaagttatatatggagggatgatattatgtatgatgatcttataaaggttgctatgactcaaggaatctggacattacttagttgtgtgcttatagtatacatattaaaagcacaggaaaccagagacttaaagcaggaagaaagagaaaaaaactatcaggaaataattaaggagcttactgataaattaaatcttttagattctatgaattcagctttaaatgaaatcaaaattaagattaattaagctttatttttcagatttccttaatatataatccagttatttctttgagatgtgcattaaaaagtgtttaataatataaaataaaagtatataatctttaaactttattgattatatacttttattttcgtgtaagcataatgctattatgtttatttttgtcatatatttatgtataatataatttaaatagacttagattgaggtgatttatgattttaatatttaaatatttggatattcttctattccttgtttttttctgcatttcattaatttttatgataaattatatccaatcctaccgtaggttagttggagataaaaaagctaatttagtaattgattcacatttatgctctaataaacactcatattttatgtatatctttattgtatttcttataataagaaatattgcagaaagcttttctttgtacttattgttaagtaattgtattcttatatttattattattttatgtctatttttatatgacaaagttgtatctaaaatgtattttcttgaagatggaatttttattggaaataaatttattgaatatatagatataagaagccttgactttatagaagaaaaaaatgaggttttcattgtaaagatatattatacctttttagaaaaagtttttactgtttcatataaaataagtcttaattcaaaaagtaaaatcgaggattatattaattcattaaattttaatattaactttaatggggaataaataaaacttattaaatccactctatgaaaaaattttaatattggtgaatatttcatttaacttatgcaaataattatcattgaagtattaactttcaactatggtaaagagatagcattttagattaccctgctatctcttttttattatttatttaacctaacaattatttacaatattatagttttgaatatttttttatgaaacgcatatactactctcgtaagatagtagtaatttaatttcattaaaagtgaaccaccagaataagcccttattttcaagggcttatttttgttttattaaataaatatctattctgaatatatatattaacttttcacataataaaataaatcaattaattataccgtttaattaagaaaggtggatgatttttaatgaagagatttcgtacagcattatttgctttcttattaatattagttacatcattaacaaccagcgcttatagtcaatctggtaaaactctttctcaaggaatttataatgcaagagattcaaatttattaataagtactcctatgacggttaaaattgattctcctagcggcaaggctattatatttatacttgattctgattattccatgaaggaaatggtaaagttagaagccgaatccactgaacacactttaaagccatttgattatggttccttaatcatagtcgttggtaattcaagtgttaccttttactaaaaggcactagaaatagtgcccttcttatatttcaaaatttatttattcataattctatatcttagtgatggaagtttataaaccacaatactattatacaaacaacaatattaggtattaatataatcaataaattacttactatttttgttcttttattcctctcatcttttccttcacttagataattagctaagtatttatcgccactaataaaggaaccatttaaaattccacatataacaatacaaaaagcacttaagaaaccagatatttttaatgttatattataatcattcattaaaaatcctgctatatacgcaactatcgcaataattaaaccaatagtaaatgataccttcaaaacttctcctcctcaagaattctcacatgcttattaagggtaaacccttatattgtaatcattataattacgttttaatatacttgctaattatgcattattcatagtaggtataacctttcattttactttgtattactaatataagatttataaaatgaaatcctccaattgataatataacaaaaatattagaaatattaaaagtaattattactattccagccacagcaagatacactgaatttaatattgcaaactttaattgcatcctgaaaaattctcttggttttataattgtcattgctgtttttcttgcaaatcttctattgtagtaagtaattttatccctatcacaaatagaatatattaaatagactactcccattaaaattggtaatataccaagccaattcatctcaaatccccctaataaaaatgttctattacagataacccaactataatatatacttatgcgtatacctcaccgaaatcataaatattttgattccgaaaagcaatgaaaatcgaacttatgtgaatcctcaccaaaatctaatataatcctattgaaagctgctaagaatggctttttctatttctttaatagccatatcgtactctttaattccagttaaggccttaaattcttcattgtcaataattgatttaagcattttctttctaactattttttgctcttcaggttttatttctaattcaactttattaaagtaaggattgctgctgtagtcatatcccatagaaattacttcttcaatataggttttaaaccatttggcagcagcttctttatctccaatttcaatatataattcaacatatttatatgcagctgaacctaatccaacatgaaacatatcctgaatcttatggcatgcatctagataaagcattgccttttcataatctttttctttctttgatgtcttcgccattataattagcataaggatactattatttagataattcaataatttattgctacaaaatctttgaatttcttctttctttccctgcttttcaagaataactgggtatagagttactggatccaagctttttggaagttcactaagtgctctttcactttcttcataatttcctaaaatcatattcatatgagcaataaaaaacagagctgtttgcatatatttaggatctttactttcagctaccttattaaacagatctaaagcttcttgtctttttgcttttacaaactcttctgactcatcctcagacatcataaggtatgtgttaagcaaacctgcaacttcgacttttaaatgaatactgtttggatattcacttaaatatcttttacattctttctcaccagctgcatacccttcattaagaaatagttttgtgagctttgattttatattattaacttcttcttctgaaagttctttatgaaatgataataatgtatcaatcgatgtgtttaaagctctggctagaggagctaatattgaaatatcaggcattgaatttccattttcccacttacttactgctcctgctgaaattccaatcataagagctaattcctcttgagtcaattttctttcttttcttaactttaaaattgtttcccctatatttaattcgttcaattctatacctccgatatttatgcttcaaaatgccttttgataaatttattataagtttaccttttataacaaacaatagaggctaattcacatttaagttaagaaaacttgaatgatattcaacttaaatttatttaaaaatatacagatttcaagtataaattctattaataattactatgcagtacttacttaatggattatacctgtgctgcacgaagttttttccactttcgaattttgctgcgaaaagatttaaaaggtgcaacagtatttatatgaatccatttccaaactggccaattagatggtgttgactctgcccactttctgcctcctggattaaataactgatcctcatcaaaaccttttatccataaaataatatcctctacatttgaaatatatatttcctttaactctgataacgaatagtcattatatttagcataaaatctttcatataactttcctagttgattccatttaaaatctttatctggtgttattacttcctttccagccaattcatcactttcccagcttttaagctgctgcatccacccaagttgatatgcaataatttcttcaggggttctatctattccttctataataagattcttatcactttctgctacatcatcaaattcttttataaaaagtgttgctgtcctttttatttcatttatgaaagtttctttatccgcatattgctccataactacacctcctattttgtataataatacagcataaaacttgacagcatcatgtcatattaattaactttactagagtattaattagctttagtgaaatattagtttatctaaaaaatacaggtagttaactgtataagtagtatcgctatctttatatctattttaagcaagactctatataatcaactggcacatccatcctaatagccgtttcttctatggataggccactatttaagaatctttttacgacagtaactatattttctccaacttcgataatatgcttatcaggatcataaaatctaataacacgctgcccccaagaatgttctatcataggatgtacataattaatatctgagatgctgttaatcttttggataaatctgtcaaaatcatcttcctcaaaatataattccgctacatttccaccaaaagcaatttcatcattttgtttgcatataaatgataaccaagtatcttttgtttgtaatgcaataccaccagtcaaagttacatttgctccaaagtcaacaacaacctctagcctaagtacttcataataaaatttctttgatttctccatattagaaacaactatcattggatttgaaaacttcattttattcctctcctttagctagctttatctcttctaacctttcctcaactgctttaattgcttgagttcctgttttgcaaagtacatttattcccttaacaatagttacaattacatatgcttctactaattcttccatagttaaacctgcttctacagctgcaacagcatgtgcctttgctccacttacttcatcatctaaactatccaatatagtaaaaattaattcccttgtttttttaggaagatgtccattttcaattgattcacgcattgccaaatatccacttaacccatctggcgaatatttagaaagtgcatcagcgaatggcggattccatttcaattcttctttataatatttaagtatactttcaaaatccttcataactaaactccccatcatcttttattttcttaagaatatcattaaattaatagtaaccactaaatctataatttcttaacaatataatcaacaaatccttgtcttattttttcaccttcatccattctttctaataccctaatttctttatgtaatatttccatatcttcaaaatatgtatctggctcacattcctcaaaatatgaatgtattacaggagtgtttctctccatttgctcatattgattttcaccaatatctaaacctgttccataccgagaatcctttgtcgtaagaaaatttacagaaagtaaacctctaggctttaatacgcgtttcatttcatttattgattttaaaacatcttcttttctcatgtgaaatactgaattatacgaataaacaaagctaaatgttttatcttcaaattttaaatatctcatatctccttgttcaatatttaaatcttgattttttcatctgcatacatattagccttttttaattgattaatatcaaattctattccatgtgttttatatccatattctgaaaataagcttaacggtggaaaattccctcctgcaccacaatctagaaccaccttatccatagttgtttcattacagaacatgataaatctatacaatggtatttgcctaaatatttcattcattttaccttgtcctttctattaaaaatattttataaatcacctaaatttagcattgctacagccttttatttctcctaaaatattctgacattataactaaataataacatatattacaattataaatcatttaaattttattaagtttcagtctgtgtgctgaaatataaaattatatttttttacttaaagtctttagcaaatcaggtgttcgatttaaactcaaatttagaaacttaattacaatatatatttttaatagactccaattaaatttattacattctttgacacgatatacatatagcaatcaaaaatatacaaatttcaatcataacaatgaatactttatgatttatattgatgtattttgttgaaattcaaattaaaatatattcttcagaaagaaggaactatttaattttttgagaattttaaattataggtaaataaatataaaaagattaatttatgaggggtgtgtttttatgaattttaattttaatactagtttttctatggagtttgatgctattgacaataagcataaagaattatttaatcgagttaataaacttctttatgctttagaaaaagaaaaggatagtaatgaaattttaaaagctttagactctgttgaatattatgcaaataataattttgatgaagaaataactcaaacaaaatacaattgttctgaacttaagatgtgtcacagaaaacttaatatggaaataagaaaattaagatattcatttgaaaatccaggaatttcatcattatttacgcctctaatgcagaaggaaataatgaagtggagtaaaaattacataattggcttacataaatatacatatgcatttttaaacgagaactcctcatctgctactgaagttatgttatagcaagatgatttagctcaaccattggcttggttttttacttcttcaaataattacccctgcaccgtgtttcacggcacaggggtagtttctatatatcttgtattagtttgcaacatttcttgttcaattcttataataattttagctcctaactttaaatatattatggcatatctccattaaagttaatagttgacattatcagtcccattgcaaactttcaccgattatagcacgtgcctatacgggcacacccaaaatataaaatatcaaatattcaatttacaccagttgttctacattctccttcgttctgttaatttttaaggaactatttaaatattaaaaagcaagactaaaatctagccttgcttttttaattcatatagataacacaatcataaactctacttacactatgaaatatcttccaaccagaaatgagttatatgcataagttcaggtcttagctgggttatctataatcttttatataaattattcttttattaatatgttcaataactttacatctgttaatgcttccattccatattggatatcagcttctaatgcaaaaatatcaccttcgcttattactgattcgtcattttcattgtaaacaactttagcttctccttctattacaataaataatgattccatttgataatattccttatctatgctttctccctttgcatatgaaaagaatctaacttcatgtttttcattatctactaaagccttacttgctattgtatttcctgaatgacttatcatatccttcatttttattggttcaaatggtttgatatttcttaaatacttcataggcttaatcctctttcactactattaatagcatcttcatatcttcttttgcagttacttgatgctgaatatttgcaggcataactaccacctgacctttgtgagcttccattacttcatcacctatctttacagtagctactccttcctgaataacaatcatagcatcacctttagctgcatgaggcccaacaccttcaccttttccaaaagctaatgcagtaagtcctacacctttcttttgagccattgtaacagtttctatttgaccttccttgcagcttactaagctgtcaaaatctattgcctttgatttttctatattcttaattaattcttgcatattacattctccttttcatttttatatgtaggtaaacaacctctctccattgatttatatatagccatactagaaataatagggattcttttgtgcagtgtttcattgagaattttgctgtaggatttcttcagtacaagttattctatttttgcttgtgatttgcttgtcaaaggagcatgcagaaattggtacaacttatactgttagaaatccacagtgaaattctctagaaaccgaaataacagaatccctgttatttcggtgattataaccataactctaagattcatttagtttatctacagataagctgtaaatgtttctattagttcttcattatttttgtttatattgctatcaaaatatagatctaatacaggagtatttatttcttctttatatttttctctcagtatttttaatattgtagccgtattttcatacattgagcttacaacaataatcccatcaacattttctgctgttaataatttagcaaatctatatcttccgcttcctcccgcataatttggaagcttatcttttagtatttcattaagactatcaatatccttattaaatggagatttttcttctagaatcaaattaactttattaataatcttcttggcttcatctactaattttaaatatggtttattggtcttatttctcttattgctaaaatctttatatagcatatataattcttctgcaaatggctgctttacaacatcataatcttccattagcctttttatgagattattatttaaataatctttatgcactactaaagcttctccaactataagaagtttctttttattttcttttaatatctcactatttaggatttctaatttttcatcaaaatatgagtctgatatattattattttttattgctttaattaaatcatctaaggatgtttcttttttatcttcatgtaatatattaatcaaatcccctattaccagtgctttaaagaattctagaccaaaatctttatctcctaagtaatcttctataaatggcgcttcgagatttaattttctgccacattctaaggctttatattgtataagcttcccatactgcccaaaggtttcacttccttcatctgtaggaagatataatgtatattctttttcactttctttaactttacttatgacttctgatattaaaccagttaatgaaaaatattcttttcctcttgaaaattgctttccaatttcaattgtgctttcacttacaggttctaatattgtaacctttgtattttttctttctaagaaagcttttagtatattgctatatggatacatatatggaattatcacttcattttcagtttctatttcattcttagagttttgaagtttattatcaaatttaacttcattaaccattccaagttttttactacaattaccttcagcagattcctcaactttattttctaaaaggccattattatcacaatttttaattgaatttataaatgcctctacccttgtaattactccaacttttgaagagtgttcatctacttctatatgcaagtaaggcttgcttcccatttcctttttaaaataatgggtaagaattgtatctgggccacatccatggttagtaatatatattggatataaatttttatgatttcttataatttttgctcctgttattatgtgctgcccaaaaggccaatacatattagaatattcttctccaatattcatttcagaagcctcaaggtgagttaaatgaagtactttatatccacgctttttcaattcattttctatgcccatgtttaatgctggatcaactatgttatatactctgcttatcattacaaatactttttcatcttcacctatattctttaaaacatcagatccgagtgattcaagatttttctcataatccataaactttttcataccagacattactgctgccgctgtttctattttgttttttccaagatctttccctatgcttaataaagttttaatcatatattgtttgccaaaattaaatgataatgttggtgatattaactttatatttttttctgccaaattaaacacgctttcaattatctttggtgaagtctgcatatacacacatgcataatcttctcttacatctgaacctgcatgcttcatagtgtataaatgtggcaggaatatataatcaactttcctctgtagaagccatgctacatgcccatttattaatttaactggaaaacatgtttcttcaaaagaatattcctggctaaggcctattatatcttcattagttgcatctgaaagtaaaacattatatcctaattttttaaatatctcattaaacatcgggaacattttattaagaaataatactcttggtatccctattgtttttttattagcatctttatcagttatatatccgtctaagaataatttttcacctttatttgaataatctatactgctattttgtttcttatctttctcgttattctttatactttcctttgttaaaaccgccgttcctaaagcacctgtaacactaaagaattctggaacaataatttctttattaagtaaagctctaaatgcatttactactgcttgattatgagcaattccaccttgaaggaaaattttatttccaataggcctatttccaacaactctgttcaaataattttttactatagagtaagcaagtccagctgaaatattctcaatgctttcgccttctcctattgctttacctatgtttccttcaataaaaactgtacatctatcccctaaattgcaagggctatcgccttctaaagcaacctttccaaactcattaatacttattccaagtttcttaatttgctcttctataaacgctcccgttccagctgcacatattttattcatttcaaagtcttttactaacttattttctatacatatatattttgaatcctgaccaccaatttcaaatatggtatcaacatcaccacatacatttatagctccttctgcttgagctgtaatctcatttacaattaaatctgcattaattaattttccaatatactctctaccagaaccagttgtacctattcctttgaatttaaagtcttctcctaatctttcctttaatatatcaaaatactcggtaacaacttcttttggttttccattagtttttgtataaatataatcaattacgttgttatcttcatcaataacaacaaaattgatacttgttgatccaacatcaacgcccaagtaaccttcttttaaattattatttatacaagtatgcttatttaagccatcatttactccgaatttatctaacttttcaaacaaactatttttaggcttttctataattaatttttcagaagcgttaagtttatttacatctataattaatcctttttcttctgctatcttgcaagctccaaaacatgtaagtagctcaaaattttcttcaattataatgtcttggtcttctaactttaatacatcctttagagctttaactactcctttgttatgtattaccccaccagaaagcatgattggtttattaagcttatttttctgaagaacatttgctttataatttcttacaagtgcatggcataatccttgtaatatatcctctactttcactccatcctgcatatgatgtatcatgtcagtctttgaaaaaacgctgcatcttccagctattcttggaatttctgtagctttttctgtgtaggctgatatatcttttatatctatagataatcttgaagcctgctcttctaaaaaagaacctgtaccagctgcacagcttgtattcataaagaattttacatttttaacgtctatatctgtaatatattttgtttcttgtgcaccaagttcaataatagatttaacattcttatttttaaataaagctccttcaataagagaaatactattattgatatgatattttttatctaaattaattcttgatgataaacttcctgttatcccaataaccatatttgattctttattaattactttaatcttctcaattaactcactataatatttattaatatttcctttatggaatatataattactttcaattaaattatcattactatctaagtaaacatacttaagagttgaataaccaatgtctattcctaatttattcatatcgcccctcctttgatatctattctcatttacttcttataagtattatattatactttcactatagactccgtatcatatgatacgctttaaaagaaatttatgaggagtctaatgtcatatttagataatttaaatatttcatgtgcttctgaagtccaaatgattgaggtttttataaactaaaataccctatagagttgacttttttatcgtctattctataggatacaatctaattatcttatgatccatccgctattaaaaataaagtttgcactatatctttcaatctgaagtattgctccatcttttcatcaattaaacaaaatttacaggaatgtgcgattttaaatttcatatttttagttaagactaaaaataaattatacagattaatcaatagttagctacaacaatggattatgccactatctttcatctctatgatcataatcacaagtacgagctggtggaatactctgtatgaagttgaaaacattttctggatcatatttagctttaattctcctaagcctagcaaaattatcaccataatattcatgaccgtaatcttttatacataaatctggtacatttacatatgatcctgttatatatggctgcaatcttgcacgtgtcttctcaacaagcataatattctctcgtgcttcacctttttcaatccatgatgcatcccattccaaataatatttagtatttcgccagaaaaaggctgtatcctttggatttacactattcatagcgcctccagagttaaggaaaaagaaattagattcgcttccttttgccttttctaagaagcttcttatcgcttcaattccttcttcaggtagagtttgctcaacccaggcagatgaccacgtactcttctgttcatcgaagaaaggttcatttggagcccagaaatctattgcctcacttagtgtaaccccatcaataactacctttaaaggacatcctacttctatcaaaggtcttattaatttcttcagttctgctttagtcccaaggaataatccctgtgaacggagaagaccatttgttttagaatatatctccaatatagtaccaagtcttacatctacaaatggagaccacctttgccatgcatcaataacttcatctaattgctcccaaggccaaattatttggaatatcccaacttcagcaggagcacgacgtattctaaatgtgtatgaggttataataccgaagttacctcctccacctccacgaatagcccatagtaaatctggattttccttttcgctaacgtgcataatctcaccatcagcattaactatagtggcagctagaatattatctgaaatcactcctgctgttcgttgtatagcggtaattcctccaccagtacttattccgcctataccaacagtagagctatctccaaaaggagcaaggaaaccttcctttgccagcatcctcacgagaacaccaacgcgtattcccgcttcaactgtggcaattaaatttgctttatcaacctttactcttttcattagaccagtatctattacaattccaccatttgtttgtgaaaaatcttttgctagagcatgcctgccgcttcgcatcctaattggtacatcattctcacgggcccatttgactgcattttctacatccttattattctttgcaaaaacaaatacactaggaaacgcattagtgaacggattccagttcattcgtgcttccctatattcaggatcatttggacggactacctttccagttaattttgttttgcatttcatatagtcaccctcttttgtaaattagccttatataaaaacaatgtatttttttacacaaagcttgttatattttataatatgaacttttatagaattagtaccaccttttgactttacatctaacataatgatataaaaataatatgagtttttgcctagactactgtgaattaaaaaggcaagtacactcatatatccccctgtactttttcacaaaaaagagtatacacttttcattgatatgtaattccacatgtgatttttcatgctcatcctgatctgagattaatcttttaaattccccaccaagtaaatatttctttattctcttttaaaaggcaaccttccaaataagactttctcataattaatccccccacgaatcacaatgtccacatgattgtccagcgatataattttctagagaataaataaatcctcgacaatactataattaatattgtcgaggatttgtttaatttacatgatgtcttcctcttggaactataaaaggtgaattggacactggatcttgtattaccacacaatctaatccaaacacttcattgattaatcctgatgttataacctttgatggttcacctttaccaattagttttcccttccgaagagcaaatatataatctgcgtatctggcagataaatttatatcatgaaggaccattacaatagtagttcctcttctgcggtttagatccgtcaataaatcaaggatttctacttgataagcaatatcaagatatgtagtcggctcatccaaaagaagtatatctgtctgctgcgctagtgccatagctatccaaaccctttggcgctgcccgccagatagttcatctacactacgattagcaagatctgttattcccattatttcaagtgcctcttctactgcatcaaaatcacttttatccatgctttttaaaaatgcttgatatggaaatctacctcttgaaactaagtcccagactgttataccttctggaactactggtgattgtggaagcagtcctaaaacttgtgccaattttttagaaggcattgaagttatttttttgccgtcaattacaacatctcctgaaattggctttataagccttgcaagtgtttttagcaaagttgatttaccacatgcatttgctccaataataacactgattttattacttggaatagttatatcaattccatcaactataatctttttttcatacccagttactaaattttttgcttcaagcaattgttgtttttcattcattatgcttgcccccttctgtttatagttattagaagcaatagcatatatggtgctcctaaaattcctgtaattacacctacaggaaatcttgtactaaatacaaactggccaatcatatctgctccaagtactaataatgctccaactaaacctgatgctaaaacatttggtgctcctaatccaactagtcttgctgaaattggacctgataaaaatgcaacaaaggctataggccctgtaacagcagttgcaaaagcaattaaaaatacggaacttaagatcaatgctattcttattaaatttattttaatccccagtgttgttgcaaattcatctcctaattctaatatttgaagatgattagttaaacataaaataataactccaaatataataacgaccacaagtaagcctgggacatctttcatactcatcccatttaagctaccatttaaccatgtgagtgcttttgagacatcgtgttctgaagccttaatcagcaaaaatgatataagggcatttaacattgcttgcattccaattcctataagtattaatctgccgcctgaaaatcctgaacctttagagaacatatatataagtcctgaaactaaaattccagaaattacagctgcaatagaaacaccgcttccactcatgtgaagaactaatatacaaaataccgctgccacactagccccagaacttattcctataatatcaggactagctagtggatttctaagcatagtttgaaatgtatttcctgcaattccaaaggctagccctgctaaaagtccacaaagcattcttggtaaacgcaaggttcctatagtaaatgtagctccttgtatctcttccccactaagtactcttacaactgtacttaatgaataattagttttaccatataaaagcataactccgcaaagacctaatgttaaagcaaagagaattatattaacgctaatcatgcgtttttttctttttgtataaccttcttttatcatagagtgagtagtttttatcatatagccctcaccttcgctttccttgcaatgataataagaattggagctcctaaaaatgcagtaataattcccacctgaagttcaccaggacttccaattactcttcccaaaacatctgaaattgttaaaatcaccgctcctccaatagctgacataggaactaaacctcttaaatttgagccaaaaatgagacgtatactgtgaggaatcattaaacctacaaatcctatgggtcctgcaattgctgtggttgcaccacatagtataacccctgcaattgcacatataatcctaataattcctatatttactccaagaccagttgcaacctcatctcctaaagctaaaatatccaatgctggtgctgatattatgcttattattaatccaattattaaaaatggtaacattaagtcaatactctcccaagttgcaccacttacacttccgacctgccaaaatctatatgcatctataacctcacttctaggaagtattattacacttactaaagaggttaaaaccgcactagtagctgagcctgccaaagcaagttttattggtgtcatacctccgcttccaatagaagctatagtataaacaaatattgatgttattcctgctccagctaatgcaatccagatatactcgttagctgaatttatattaaaaaatgctattccaattacaacaaataaagatgcacctgtattaactcctaaaatgcttgggtctgctattggatttctagtgattgattgcataagagcccccgatattccaagagaagctcctgccataatactaaaaattgttcttggaacacgttctcgaacaactaatgcagcaaaagacgtatcgtcactatttaataaagcatttattgcttgactaattcctatattttttgacccaaatgccagtgatattactacacatatacctagtaaaaaaatactacctaaatatattcctactgtctttctaaatctcattatgctttatctgctgcctctccaattatttttagatattcatctattgttgctggaattgataaggcagtaggagtacaagatgctgcaagtgctgatccatcttctattacggcaactgatcctctttttattgctggaactgttccaagtagggcatctgattgcaattgttttactaatgtgtcatttccatacgttactattacatctacatctgttaatttatcaatattttctgaactaatttcaagagcaaaactatctgaagtctgcgcaagctttttaacactctctggtaattctaatcctaaatcagttaaatatgctgctcgaggatctgatggaagatatatataaaatttacctaggtcagctggattaaagtaacaaaaaacagcctttttgcctttaagtttaggatactcactagttttttctgttatttgcttttccaaatctgaaaccaatttgtctccttcatcttttttacccattgcagttgaattaattgatatttgatcacgccaatatgtttgccaaggaagtttaggatatgctacaacaggagcaattttacttaataaatcatattcttcttgtgttattcctgaatatgcagctaatataacatctggctttgcattactgatagcttcatagtctaaaccatctacatcgtcaaaagtaacaggtttatccacacctaactctttatatttttctgctgtccatggcaataaaccattttcatctgcttttccatagttagctttagaaactcctgctggtacaactcctaatgctaatggtacgtcctgatttccccaagaaattgtaacaaccttttctggttgcttttcaattactgtttcaccaaaagcatgtttaatagtaagcggataagttacagtcgcactttgtcccacattagatttttcttcatttttagccgctccacttgagcatcccgttattaataaggtacaagcaagaataatcgtagttattccttttaatttcatgataatcctcctaattgttatgtattttatttaattaatacttatttgatttttatattcaaatgataatgtttttcatttgctgtcggtatttattttatattcatcagtaaaatttgtcaaccttacattggaggacattatcttgaaatttgtggtaatacttattaaataaacttattttcattatattttgtgaagatcttgccttcatagggagttcctagaaaagaacaaaatcgctggcgactgtgtttaagttccgtattgtgcttcgcactcttttcatatgtgtagattttttcacgcatctgccttttcgagcgcatgtgagaaaaatctgcacatcagaaatggcagctatgcacttataaaaagagtagctatgctacaatactgaactattctgcatataagaacattttatgcaggcgaataagatttcttttttattcttttttaaatacaaaaactagtcaatcaacctttttaagttataccctcaaggagtacctcgtctacagattttattggaatataaattcctaaagaataaaaaatatttatgataaatccttgttataattgcgtttgtaaacagcaatgaaaacaaggatctatacataaatatttctgaagaaatttatattaaattaattaatttaattctatagatttagaggttcttttaatattaagttcagttaccatcttattcgaaaacttgtccatatttataaaatacattacaattaatccaattatggtaaatacaatccctgagtatataaatgaaatattaattgcctttattgctgcacctgtctgtacagtagctgttccattatattttccaaagtcaaggatccatccgagaattgcagtaccaagacctcctcctaatttcattccaaaacttacacaactgttaattaatccatctgcacgtattcctgttttccattctccataatctacagcatctgcgacaattgcgaaaattccaactattagaggcgccataccaaaaccctttataatacttcctgccataacaagctcataagaagcaggattaattgccataataataacacctactaatttcactagaaatccaaacatcataactttccatttaccaaatttacttatgaacttaggtaaaagtgcaaatccaactatcataggtgcataaagtgctaaagtaagcatgcccattaagttagcattatttaatacataggttgtataataaagagtagctcctgaaaatagccccatatctgtataaataataataaacataatcgctataagtaaaaaatatttatttttcatcaaggaaccaattcctacttttaacttgaatttttctcccttttcatcctgatttctttcttttgtaaatgcaaatgttatgaatagaaatgcacatgaaattattccataaataactgcaagttttgaccatccatacttttcaaccaatggatttgtaatcattgataatataatagtaaatgagataacaaaaacaaatcgaattgagctcaaaactgaacgttcttgtatgttacttgatattcttgatagcaatgtgcaatatgacaaatttgaggccgtgtatacaattgacactaaaaatatataagtgatatatgcataaatcagctttccaccattgctgagccccataggaacattaaacaataatatcaaaccaatccccataaatggtgcactccataaaatccaaggtcttgtttttccccaccttgtattagttttatcaataagtgctccaattgataaatctgttacaccatctaaaagtctcgcaatcagcattagtgtcccaactgctgctactccaagtccaacgctattagtataatatatcatcaaaaaagaagtaattggcacatacacaaagttacatcctacatcgcctattgaataagaaatcttttcttttaaattaattttttcttccataaaaatactcattcctttcatagtactcaacatataaagtaattaaacgattaccttaagaatatatatgttctaattaatgatgcacatttatcaataaataataaatgctgaaacttttttgagttttcaataattcctattcaaaaagcattgaattctaattaaaacttatatattataaaaatatggcttgatatggcagagcaaagtaattatatttttatgtacatttaatattaactaatcaaccaactaatattaactgccattaaactaatacttttcactctgtcatttcatttgcatttgagacaattataatgtaacttttccaatgtgtagatctgaatctgcactgctgcttcctatatacacctcatactccattttctctaattccatttgttctgtttttggattataccagcaaagctcctctttagggcaagttattgtaacttccttgctttctcctggctgtaaatttacacgagcaaaacctcttaacaattttacgggtctctctacagatgaatttttgaatccgacatacatttgtacgacttcatcccctgccatttttcctatatttttaacagtacatttagcgataacactatcatcagatgcatcaaactctgcatcactaaaatcaaacttagtataagatagtccatatccatatggagcagatggttttatgccttccttttctaactttgtatatccatgatagtaatcataccattgagatgttgtatcccaatttacttgtggaagatcactttctttaaatggaattacatatggtagttttccacttggattaacatctccaaatataatctctcctattgcagttccgccttccatacctggataatatgccatcattatagctccgacgctttctttccattcttccatcattatcatatttccaccaattaacacagctatggaattagtgttaacaggacctacttcctgtattaatttaatttcattttcatgaagacctaatgaattttttctatctccacctactgctcctgtataagattcaaattcatcttctgatatatattcaccttcatcgtcatagttatatccaactacaaatataactgcgtctgcatctttagctaattcttttgcatgttccaaattttcaccattgtaatatacaacttgtgctttaggtgctgaatttgcaattccttgtaatggtgttatgacataagctggtcttacctgacttgaaccgtgatctccaattacttctttatcgcctaactttcctaacacaacaattttttttgctttatctttgcttagtggcaatacattattttcattcttaattaatgtaatcccctctcttgctgcctgaagtgcaagtttaatatgatcttcacatccaatcacactctcatcatattcatttgaataagcatcttcaaatgctagcaatgtacgcacgatacgtaatgcagattcatcaattttactttcttttacttgtccgttttttactgcctctactaatttatctccaaagaactgagtgcagcacatttccatatcttgtccgccattagctgcttcaaccgtatctctaactccccagataaagtcactcataacaaatccatcaaaatcccattcctttttcaatacctgatttaataagtaatcatgatgtccacaatgagttcctttgtataaattataagaactcataatagctgctgcacctgcttcaacacatttcttgaaatgaggaagaaatacttctctctctgtacgtttatcacattcaacatttactttaaatctggaaatttccatttggttaaaggcaaaatgttttacacatgcgattacattttcgtcttgtacacctttaactaatgctcgtcccatttcccctaagtgaaaagattcttcaccataagtttcttggcttcttccccagcctggattatacggaagattgatacatactcctgcaaataagtttcctttatacccatgaacttctttacctatagcattacctattttttcttctaatgctgtatcaaatgttgcacctctaagcattgatactggaaaacatgtgctttttcctgcactacaaactacacctcttgggccatcacagaacagcataggaggcaccttattcttctctattcctcctgctggataaggataactattataatgtttttgctcatcagcatctctcaaatcagagagcatatcattaagagtaacatttccacccattaaggaaaccttttcttctaaagttaaagaattaactattttctttgccttttcagtataagataatctttttaatttagtacatttcatttttacatatcccctttacaatatttttctaataaattaatagattctttaaaatcaaaacgcaaatagccttgtacattaggatccgcatttaaacttgccccactttttcggtattcagaaggggtcacacctatttcttttttaaaagctctgtaaaaagtactttcagaataaaagccacaatcatttgctataaagctaattgacttgtttgaaaacttaagcatatatttagaagcctctattttgctgctaagcactaaatccttaggtgataatccaatgtttgcctttaggaaacgataaactgatttctcgcacaagcctataaatttatatagttcatctaatactgtatcctttgtacagtttttttgaataaagtttattacctgcatgagcaattctgtgttttctgtttctttcaaatctacagctttttgatgaatatcatataatgtgaattcaaataagtccgctattaacatataaaccaaagattttacccggtaagtgttaaatatttcatcattctgactttcaagtcctattttagcagcattagcaacgtatgcatcatatccgttcttaggttttttatcatcaagcttgctatttaagtaaaaataatacgatctattatcatcttttgtatttttgaacaaattctcattcatctgaataaataagcataaattctcttccttagtacgttgtaattcatgtactgcttttgaatttaataacacaatatcccctgcttccaaaaccgttatcttggggcttgcatttactattaatgatcctttcagaactaaaattagttcataatcataatgccaatgaaaactagaatgttcaattgatgttacaaacacctttgctggatatttctcttcatgctcaattgtttcaaaaatatatgaactcatatttcccccatttcatgatacactataaccactttgtaaatatttacactttgattataagttatatcaaaatatatttgttatcatttttgtacaaattctatttcattttcagactactcatattataactgaatcatataaggtgcataaaaataaattaaatatttcatattatgtatagacaatctataagctaataaactgtatagaacttaactaattccctaatttctagctattctgaatcataataaaaaaatggaacaataatttatctttgaaatctcaaatccaataatttggaaatttatgataaaatattattatgagaaaaagaaatattataaatttaacagaagatggaattagacttttattagactctattaaaaagtaaaggatgtatcttatatgttaaatgtaaaaaaaatattattaggtgtagtttgtcttgttgttatcacagttatcatcgttggaggaaaatatctaatctctgttagaaattatcaaaaaacaattaaaggattaacaattaacaacgtagatttatcaaagattcccgatggaaaatatactggttcatatgatgttaatttaattagcgcaaaagtttcagttacagttaaaaaccacaagattgaaaatatagatttactagaacataaaaccgatagaggcaagcctgcagaaattattccaagcatggtagttaaagcacaaagtttacaagtagatactgtttcaggagcaacaaatagcagtaaaacaattttaaaggctattgaaaacgcactaaagcctaatcaaaaataaaaatatatcaataaaataggctgtagatagattttgtttttacacaaatctacctacagcccaaaacataatatttaaaatccgatacacataatctagctccatatacgttataagcattctatttcacagaacctttatacctcattaccttacttaacaatattgactatgttagcttgtcctgcatcaacctgtatatcgccattaaccagttcacatatttcgccactagtaaatataactatcacatcagttgatggaactttatcttttatttcttctatatcaaattccaaaagcttatcacctatttttatcttttgcccttctctaacaaatgtcttaaatcctttaccattaagtttgactgtatcaataccaacatgaattagaatttcagctccattgttagcttttatacctattgcatgcaaagttggaaaaatcattgatactacaccaactataggtgaatacacaacaccttgtttaggctcaattgcaaaaccgtcacctaaagctttagacgcaaatacctcatctattacagatgttactgactttagttttccctccgttggtgacactattttgaactttgtcctattaaataaattaaacatattttccagccttccttttataaactacttttttctatatttattgcaccgctaattcttatctccagacttttgcaccatttagaaaatcataaatacaatatatcagttaactaaattgcaaatttttatctaaaatttgcaatattgcctctgctgctccatttttatcattgtctagtgtaatgaaatctgctctagctttaatatcttcacttgcatttcccattgcaatgccaattcccgccatctgaagcatctctatatcgttattattatctccaatagcagctatttccttcaaatctatttctagcaattcagttagtttctccagaccagcccccttatttgcgctatgaatgttaatctcaagattatcctctacagatgaggttattttaactttatcatttatagataacaaactattatatacttcatttttcatatcatcttttaaaaatggaatatttattttttctacacattttatccattcacattctgatctatcatcaactaccgaaaaaatattcttgattaaattatgactgtctgacataagatttaagcatttttctgataatccatatttaacgggatttataaaaacctcttcatctatataagcattcccgttagaataaaactcaacaacgattggataatccttaattattttaattattttctttaaaatatctatagtaataaaattagaaaaaaccatttcattttttcttaagtttactacagccgccccatttgaagatattgcatatgtaatttcctctattgattttatctcatcacatattaatccaacacttctcccagttgccaaaaccacctgaactcccttttcaatcgccattttaattgcagtaagagttttgtcacttatataaccacaactgtttaatactgtcccgtctaaatccaatgctataagtttaatcttcatttacacctccatgatagtttattaaaaattcctgtattctcttgatattttcttcctgcaatacatagttaatataaatgatcttagttttacttggtaatgtaacattaaataaccgtattggcgtaaagatcacatctacatctatggaatactgtcttatataatttaaggagaaacttcctatgatttcgattttatcaccacagtaattattgatttgttttgccatgctcgaagctgcactttgtccaatatcacttattattattgcttttatttttgtttgggcaaaagctcccatataaagtataataaaacccaattcttcttcttgaatcttataaccatacttatcaaaaattagtttatataatatatctgccatttctgtttgaagcttatataattcctttgcatttcttatagatgcattgtgctcaaaatgtccttgttctgaacgataaagcattttatctatatgtatgcttaacattttctttaactctggattttttaaatagctacaattatattttttatctactatcgataaaaattcttctgttaactccgcgatttcttttcttggctccaatttaacacattcatcatataatactcttttagttaaaaggcaatcttttaaaaagtttctatcacactcagatattctaatatcattttgaattaaaagttcctcaatttcatttataatatcttcaaatacttgaggatactgtctactagtttctggttctaaaagtaatcctgccttattacgatatatcattataaataaatctaacaaaaatccttctaccgatttatcaattagaatcaaattatttttatataaaataataggcaattccttttgcaaaatttcatatattttgctgtatgactctccaaactgaaatttcaaaactttatacattaaaatagatccaaatgttttataatttaatgtttcagataatatatgccttatgcttctttcttttccacggaaatagatgcctttttttgttctttcaatattaagtccattaaaatttcgtaaatattcatcaatttcctttagagtttttatcattaccgtttttgatacatacataatatctgctaagttctgaactgaaataggctcttttataaatgtcaaatatataaaagtaaataaaaatctttctccaggtgtttctggcaattctaccttcttcaaactcaaaatcatattatttaaaaattcataaaactgagttctctctcccttaagaataaaataacctctagctgaagacgagtttatcctcatatctttatgtcttaatatatcatttatctcatgtatttccatcctgacagtccttaagctgatacctaacttttccataaattcattgggccgaacatattcgttatgtaataaatctctaagcataattacttgtcttgatttcataaatcctccacttttataatataatcatctttttttgctacaacattagataatatgttttatgcattttttcctccatatatttgttgtacaagactctttactatattatatacgaaagataggtcacatgaaaaaatagatatatattttaacagttcttaaaaatatttttcaaagaatttccctcaccataaataatgagggaaattcttaaattctaattaattaatctaatctcaaaagaagttccttctgaagaatcctttcctaatgtaaattcaaataatccttcatcacttttatattgattttcaccattccaatagcgaagatctttttcatcgatggtaaactctacagtttttgtttcattaggattaattataatttgtttgtatttaattagctgtttaactggtcttgaaatatctgcaactttatctctcatatacaattgtactgtttctataccagtatactttccaatgttagtaacattaacactacatgatattcgctcttttttgcttagttcttttttacttatatttaaattatcatacttaaacttcgaatatcccagcccatatccaaacggaaatagtggctcatttgggacatctaaatattgggacttatatcttttttcgttcttaagtaattcttttggtctccctgttgctaaattattataataaactggaatttgacctactcctcttggaaagctcatagcaagctttccacttggattataatcaccatatagaatatctgcaattgcatttccaccttctgttcctgggaaccagcactctaaaactgcatcggcttcttctattacattagtaagatctagtggacgcccatttattagaagaactatcaaaggcttgttcaactttttcatacaacgtaaaagctttatttgagcttctggaagagttatattgctaacacatcctgcttctccgcttttttcttcttcttctcctaatgctaatacaataacatctgctcttttagctttttctattatttcctctgatttttctttcgaaatttcattaaagcatgtcgtttctacgccttcaagcctgatattcttatttattaatccttgttcaattgtaattacatcattaaggtctccatctaaagaccatgggcctaatattgatgagttacttgcatatggtccaattaatattacatttttactacgctccaaaggcaatacatcggaattttttaataacactgcagatttagaggctgcttctcttgctacctttctgaaatcactacataacaatgtttccttttctttttcataagaactccctctgtatggatcttcaaataatccacactcatttttaagtaaaagaattctctccactgcatcatctaatagcttttccatgctcttatctttgcatagttctggtaaagcttcaaagtatgctgtagtagccatttcaatatctattccagcctttaatgataatttggctgcatctatgctattttccgctgtgccatgaggtattagttcctttactgccccccagtcggagatcacgacaccctcatatccccattcttctcttaatattttgcgcaagagccatgtattagcagtagctggtattccatttaatacattaaaggaagacattattgattttgctccagcttttatagcttcataataaggtgggaaatattcatttctcaatctgcattctgaaatatcaactgtattataatctcttcctccctctgcagctccatatgccgcaaaatgttttacacaagaaattaaggtatctggatcttttaaatcaccattttgatatcctcgaaccatggctgctccaaatatactattgagaagagtatcttctccaaaactttcaataactcttccccatcttggatctctgactatatctaccataggcgaaaatgttgcttgatatcctgaagaactgccttctcttgctgcaactcttgcagttttttctattaattcctcatcccatgaacatgaaagcgctagtggaataggaaatatagtcttaaatccatgtataatatcatgcataaaaagtagcggaattcctaaacgattattatctaaatactctttttgaatttcaaacatcatctttgcatctaatttacctaaaacagttcctatcatccatttttgctcttttgtaaatttaagcttagaaaccgttcctgttgctgaagtattagaattataataataacttgttctgatttgtgttaattgtcctattttttcttccaatgtcatcttagataacagaatttttatctcttcatttttcataagcttcctctcttactgctcttctttatctttatatccaaacatgaatgtaagcgcaaaggctactccaaaagaaatcgctattactaatatatataatgggaattggctatttaaataaagaagcattcctggtaaagcagatattcccataccagtggctttaagtttaaataatgaggctaaaaatccacctactcctccgccaacaagtcccattataaacggttttacaaatcttaaattgacaccgaatatagctggttctgtaattcctaaaagtgctgatattactgatggaaaagataaagcttttatttttttagacttagttttcatacctactgcaaatgctgctccagcctgtgcagctattgcacaagaaccaataggatttacaagattccagtttgtttgagccagcatctgaatttcaacaacacttaatgcttggtgaattcctgtaactactattaattgagatattcccccccaaattaatccacctaatccaagaggtaatgtaaataacattgttacaacgtatacaagagaaacctcaatttcatgagcaataggcccaataattaataatccaaaaattaatgtaacaagtaatgtcaaaaatggtgtaagtattaaatcaaatgtatctgatattctttttctaaaccaaatctcaaattttgcgccaataaatcctgcaaagaaagctggtaatactgatgcctgatatcctgacatcttaagaccgaataacacaagtggttcagctgttccttgagctactgcccaaccattaggaagtgatgggctaacaagcataagtcctatcataattccaagtattggtgttcccccaaactttttaaatgatgaccagcaaataagaactggtaaaaatgcaaatgcagtatcagttaatatttgagtaaatgctaataatgaactaggaatgctttctggtgttaatccaaacattgctaatatttgttgttgtaataaaactcctctaagtcccatgaacaaccctgtagcaaccattgctggtatgattggtacaaatatatcagaaaatatacgaattgctcttttaaatttattgtcaccttgttctgctaccatttggctttgttctgattttgatgtcccagatatgccaagattacttacttgttcaaataccttatttacagttcctgtaccaaaaataatttgatattgtcctgaagtaaagaaaaatccttttaccttctcaatctcttcaactactttatcatcaactttttgtctatctttaagaataagtcttaatcttgtagcacagtgagccgccgaaataatattatctgcgcctcctactgcttcaataacttctttagcgatcttttcataattatcactcatttatattttcccccttgtaattccataaatttagttttaattttccattagaatttattcggatatcattatcctgaaaatacactctgctagaaataactttttccccttcgtttataaatatttccactgatgagttatcaataaataccctaagcatttttaaactttcgttaacatttaagtatttttcatcaaactctcctgtaagccaattaagtcttttaatatttaatatcttatcattggaattgtaatgtagtttaagcgctcctaatatagtacaattaaattcattttcatcatctaaaatgaattccatctctttatagtaatccctaacttctagacttatttcttcattttctatatgtttctcaattttatcatttcttaaagattgtaattctttaattggtttctgatataaccaattatttttatatatgaactctcttggatatgtaaagctgtgaagccacccatcgtttacagataactgtgacatttgatagtcatattcaccgccccccatccaagacatatataatgttcgtttattttcatctacaaaagattgaggtgcataaaaatcaaatccttcatctactctaattccttctttatgtggtgtaaatgttcctttttcttttgaaaattcaccactcatccatactgcatgacagctatctttttctattccattttctatcttcttctcttgcctgctaacaattaagatatactcttctccaaggcgaatcatatctggacattcgcacatatatccccagttcatagtctctggaagcaaattgcctttataattccaattatataaatcttctgaccaaaaaagtgctacatttcctttcttttcactagtctgtgctcctactatcatccaccatatatcttcttcttcgtctttccaaacttttgggtctctaaaatgtgctgtatatccttctggcagatagataactggtccatgtttttgaaatgtaattccatcttctgaagttgctaaacattgataagtttctctatctccattttcttttcttacatttcctgtataaaacagatagattttttcattaaatacaattccatttccagaatagcatccatttttgtcataccacatatctggctttaatgctatccctttgtcttcccagttaactaaatctttagaaatacaatgcctccagcattttgccccttgtggtgtaacttcttctaaccattgataaaaagcatgatatgttcctttgaattgtaccaatccatttggatcatttaaaaaacctgttttgggtgcaacatgatgcttaggttttatcctattttctttatccatctaatctctttcctccttcctcttatcgtttacacctgtattatataacataagatctcgcaaacaaagtcgcttatttacctctagaagtggcaaaataaatatcatatattttcacttttttatcatgtttaatacttttcactcactacttacgtataattattttttatataagatctactaagctgactttacgaaatatttagcattacgaaattagttaatattacaataagagtatttatacagattcctataaaatcaaaacacctcactagaacacaaattttagattctagtgaggtttatggtctatataatacgtgcgcatgaataataatgtcttttcttttcttgtattttacaccttattacttatttatatattcttagatagatcttaaacacatcattctcacattctgcccagatttcacccttatgaagttctactatattctttgaaatcgccagtcctagacctgacccactaactttagagtttctagatttatcacttctataaaatctttcaaaaagttttaatgtatcttctaaaccgtcgttagctacttcatttttaaatgaaatggttacatattcactgctttctattaaatttacatatatatcagtgccttctattccatatttaactgcgtttgataacatattttcaaaaactcttcctagtttgcttgaatcaacatttaaaattactttagaagccccatactctttttttaaattcatatttcttttttgagcctcaacaaacaattctcctatgctttgctccaatatctcaaccacatttgcctctctcttatttaaagatattccgccagattctaacttggaatattcaaatagatcttctataagcttatttaacttataagctttttctattgaaacagcagtatacttctttttattttcctctgtagtcttttcgtcccctacaagctgcatataagctataagcgaagttagtggagttcttaaatcatgtgaaacattagttataagctctgttttaaattcttcctgagctctttccttttcgatattttccttaagtttctctgccatagaattcatactttcagccaaaaatccaagctcatccatccccttcttttgaatcctataatctaagtttccatttgaaaattctactgcaccttctgctatctgttttatatattttacttttctgctggttaaaaagaatgttaaaagcattgctataattacaggcgacaataaaatcattaataattcattatcagtatattttttctcatcaatttcattatacttctcataaatatatagtttttcttccttaccatctattgtgatatcataaacttgatatacattcccatctttgtattctctattaagccacttccggattttttctacatctaatttatctccttctacattttttgatttcagcaatatatctccatttacgtctgctattacagcatttacatcatataattttgcaacattatttaagtattcttcacaggattcatcatttctatttacaaatctgtttatatcaacaaaagccttattaaaattattaacatgcccagacacagtaccttcatatatataatatagaattgcacctattcccactaatattattaaagcactaataacattcattaatataaattttatattcaagctgcttaagctttttattattttattcttcaaccctttcacctcttacttatcaatcttgtatccgacaccccataccaactttatatatttaggctctttcgggttgatttctatcttttctcttatatttctaatatgaactgctacagtattatcagaattgaaaaaaggttcatcccatacattttcatatatctgttcagtacttaatactctgccaatgtttgttgctaaaacttttaagatttcaaattctcttggagtcaatctaacaaatttgtcgtctacaaatacttccctatttgctgtatttatcacaagtccatctatacatatctcatcatcattttcttctcttggttcattaaaacttgtagttcttcttatttgagattttacccttgcaacgagttctagcggattaaatggctttaccacataatcatctgcaccaatatttaatcctaatatcttatcactatcctcacttttagctgatagcattattataggcatctttttttcttctctgatttttaagcatgtcctaatgccatctaatttaggcatcattatatccaatattattaaatctatagcttcattctttaatttttctaaagcttctaatccatcacaagctgtgataacctcaaactcctcatttatcaaataaatttcgataacttctcttatatctttttcatcatctacaactaatattgatttcttcttttccatgctatacaccttgccttttccttatctttgaatctctatatttgcatattctatagtgaacataatcgcctgaaaaaataatcattaatggcataagaggatatgcatatctgctacatgtaaagtatggcagatacactgcattcatagttattatacttagggtaataacctgtttttctaaagtgaaatttttttctttaacaatatttctaatactaataattgctgtaattaatataaaataatgttctataaacgcaaacaaattttttatacctatatattgagtccaataaaacggctcataccaaaaataaaaagtctttccaattgtataccaataggcaaatttaaaaggttcttcttttccgtatatctttagcctttctattccttcctctacttcatattcattattttgtatagaatcttcactccttctatactcaactccccatcctttatcctgattatagttaataaatgtaccttgtaaaaatggattaccacttgactttgtaaatggtataaacatattaaaattattgcaatttcttacccaccaaggcgacattataatgcaaaatataattactactatactagcatatttaaccatttctttcatcttatacctagccttaatccaaattgcaagtattactagtgggtatgctgctattgtaggtttaaacaaacaacttaaactccagactatccctgcaagtgcataatattttattttcttagtttctaatgctttaatacttaaatatataatcaatagaatcaagaacttaaatgtgacttccattaatataaggtttgcagaatatatctcaacaatataaatcgaatcaattatacaagctattaaagctgctttttcattaaaaactttttttcctattagaaatattaaatttaagctgcatatctgcagaacaacttgaaatatcctaaatgccatgatggcctgaaatttcccaaatattattacaaagaatgaaagtataaatgttaatcctggcattatataaactgtgggtttacttatatcttcatacgaaaatattctattctctaccaaattccaagcgcttcttatatatttaacatcatcattatcaaaactctccaaacttccaagcagtgtagaattcccatgtttgaaaatcgaaataagagccactattataaataatatttccaaaagaataagtccaaattttatccttttatcttccttacaagcagtaatcataattttctcctttacctcgcaataatgaatgttccaattattataaatattgctcctaaacctttgttaagtgtaaagcactccttgaatattaaaactccagcaagtattcctcctatataacataaactttgcaatggatatatcctgcttagttcttcttttgacaatatataaatccaaattactgtagcaaacacatatataattcctccgactaatatataaggattaaaaaacatatcaataattccttgaattgataaattaaaactactttttcctacaccaatcttccataacacttgacctgaagctagcattattatgtttataaataataataaataaatcatctattctcttgctcctttataatttgccaaatcacagcattttcttgtatcagcctaactaatctcctctttatctcatatatttgtctgactaaataagctattgcaaaaattaatattatcaaaaaaattattattccattcataatttaatctccttatttacatttttaataaacttgcttttgagctgttatcaatgttgatagtgttactttaatcatgtaataaatcgattttagtggtgttatggatgactttccttcatatctttgcctcatatttacaccaatctctttaaccttcaagccatttttgtatgcatatactatagtttcaacttctggataatcctttggatagtattttgcaaaaagttctattgcctttttatttattaatctgtatccagaagtagtatcataataattactcccacataacaacgaaactaatttagaaaaatattttattcccattgatctaaatgtacttggtatataattggttttctctacaaaccttgaacctataatcatatcgaaattgcctttttccatttgtttaactaaattttccaaatcttttggatcatgctgaccatcaccatctatctgcacagccacatcatatcctttatttaaggcataaatataaccagtctgaacagctcccccaatgcccaagttttcacttaaatttactacttctgctcctgccttttttgcttcaaaatatgtattatctttagaaccatcattaactacaatgacatccgcaaatacattattatttcttattgaagttattacattataaatatttttttcttcattataagctggtattataatcaaacacttcattactttattctcctttttccttgatctgctataacttaattttagttatcaaaattaaagaactatttattaaatttatgaagaaattatgaagttcatcttttgtctaaactttatagatataaatctgtagttttcagaaatagagaatttaacgggaacttaaaattatatatacgttgcaataaattacataacgaaaaccttctgaataatatattcatgaatcaaaaagtctatagtctcctatgaaatgagaaagccccatgaaaatctaaattctagattttcatggggcttataatataggcaaattatactatttcaaatccaccacaaaagcaattaagcttttctattcttctgtaaagtgttcttttatatattgaactgcattttcccctgctattctacctgaatttactgcaaatcctagagtatttcctggaagtacaaatacatagtcaggattacagatagagtttgcatctgttcctgctgcaaataatcctggtattactttatcttctgtgtcaattacttctgtcttataattgattttaattccacctaagcttccatacgcacttggagcaaattttaaagcatagaattttggaccaactaatggttttaggtattttggatttttattaaataatgtatcagttgatttacagcattcattataatcatttaatgtctttgcaagaccttctttatcaattcctgtcttttccgctaattcttcaattgaatctgctataaataaaacatcatttccatttttaataagatcattcatttcttgtttgaaatcatccatacttatattagaagtaacaacattgattaagtctaaaccatttttctcatattctttcattatactttcgtctataatagagaaagctgttctatttttttgtctacagatagcattaactgagaatactggattttcaactaccgcttcatcatagaatctttcaccatctagatttacgaaaagatttggttgtctaaatggaagttcaattggagcatatccacctgtattaggtgcaaagaaaactaattccatatccattctatctcttgcagctccagcattccatgccatgctgattccatcacctgtaagtcctggaattctatacgaaaataaatcttttccccattcgaattttgtatacttattaataaattcaggactgtctccaaatccgcctgtagcaataattacagctgaaccatatgcttcaatttcaccatctttatcctttgcaactactcctataacttcaccatcatcttttattaaactttgaattggtgattctaaacagattttaacacctaattcttctgctctgtctgtcattgctttaatcattgttgcagctgctctaagtccaggtgctcctgtctttggctgaacaatatgccaagttgcttctgaacctgggaaatattttgatggtagcgcaaattttacacccatagcctctagccactcaattgtacttgctgatttataaatataattttttacaagccttgcatctgagcgccagtgagtataatccatgaatttttgaaatgctccctctcttgtgcaatcaacaagtctttccttttgcattttagtctctactcctaaaagacccattgccatattagcacacccaccagtagtatttgctttttcaaatactataacttcagctccttgttctgctgctgcaattgctgctgcaagtcctgatgctcctccacctacgataattacatctgattccatttcacgcatatttgttacctcccaaatttaattattgattaaaaatatatattaatttttgattatgagctattttcttcgtcttcttccaagtccaaggcctttcttttcgcctaaagcaccttcatcaaaacttccaacttctattggttctgctggcaatttaggttttactgagccatatctttttactgcttttacgctgcatatctcttcacattttttgcatttatcacaacaatccatatcaattatatgaattagattatttccacctttgattgctttttgaggacaatccatacaatcgccacagccattacaaagctttggatctataaaataattagcataagctatacaatttagtgtactacaaatttttctatcaatatgcttttcaaattcatctctaaacttattaatagctgtatataatggattagaagcagttcttccgaaatcgcataaggttccaattttaattgtttcacttagctggagagctaaattaatgtcactctctttacctttcccttcagttgcatccttaatgattttgtataattggtaaatcccttccctgcaatatacacatttcccgcaggtctctttgctattatctagcattttttgagttacccaattcacaacacacatatctacgttataaacttctatttttgatacttctaacattgtcccatttcctattaggtttgaatataagaatggagtatctaattcttcttctgtgaaaacagcacctgtatttccacctacctgcacaaattttattgctttttcagattcagttccgccaccatattcacttataatttcccttaaagatgttccaaatggaatttcatagattccagaatttttaacatctccagctattgaaataatttttttagggatataattttcttccaatgaattcttaagtgcatacattgtttccgcattatgtactaatgtcacttcattaaatacatctttctcaaaagctttcttattcccaactagcactacttctatttcatatgattctaattgcattttgaaattactataacattcactaagataaattttaactttttctatccctaattccttttggcatattttaattccatcaataaccttacttatgtgctgttctaataaatatcttatattttcactttgactattatcttcaataaaaagacatgctaattcttcccattccctgctttgccatctatctataagattagtgttttttattccatgtcctgatatttttatattttctgctagcattttttcaccacctttactttaccttatattcagtccagaattttgcctttgtaagttttggacgcaaatcacattgaagacatctagaagcctcgcattgtgcagtttttgtgtcaaatcccactgtcattaaattaaaattatttattcttttgtcaaccggaacacatttataatgactacattcctttttagcaaaatcttctttcattcctatcattggatctaaaggctgttcagatgataagacttcatctataactccatctccacctaaatatttatcaatgcttgatacagcttttcttgctcctgctattgcctgaattacagatgctgttcctgtcactgcatctccaacagcaaagattccatcttcattagttttataacaatcgtcaatatttactagacctcttccgttaagctcaatttcttcaaatgctccaaggtctgctctttggcctgttgcaaaaattatcatttcacctttgattaaatgttctgagttttctttgatatttaatattaatttcttattttcatcaaagtggaaatcttcaacttcctgacatactatccccgaagcattcccattattgtcttcaattttcacaaaagttctgctattgtaaatttgaattccttcttcaattgcttcttcgatttcttcatcgctagcagtcatgtttccttttccttctaaacaaacaactgcaacactttcagctcctaatctctttgctgatcttgcacaatcgaatgctacgtttcctccacctaaaacaacaactgatttcttcatttcaatgtctatatctatcaaatctcttcttaaaaaatcaatatttacatatacatctttcaaatcagacccagggattggaatccttacacctttatctgttcctatagcaattacaaccgcatcataattctcttttaattcttttaaagattctactttactgtttgtaatgatattaactcctgcttcacgaattacatctatttcagattctacaacttctttaggaagacgataatctggaatacctgctgatagcatccctcctgctactgggagcttttcatatacatctactgcatgtccaagttttgcaagatagtaagctgttgtaagccctgctggccctgatccaataattgcagctttcttgtcagttttatcctttttaaatgatttatctttccacttataagaatcagtttcagctgcaaatctttttaattcacgtattgaaacagctccatttatatcttttcttctacatgctgattcacaaaaacgcatacatacaagacctaatgatttaggaaatggtgctttttcacgaattactgctgctgcttcatcaaaattcccatcttttatgtaacgaacatatttaggcacattaattcctgctggacattcatgcttacatggaactaatacatcatctctatttccatctttgaatacaccttttttatcttgaagagcccctgttggacatacttcaacacaagccccacaaaaacggcagtttgcatctgataatgataatccatttttaactccaacataaattctatcttcttcatttttatcataatctaaaattccaacacctctgatatcattgcaagctcttacacatctgccacatgctacacatcggtttaaatctctaataattaatggattctctgtttcaacaggaactgcattaagagttcttcttaatcttgaagtactgacacctaaatattgaattaatgattgcaattcgcatttcaaatactttggacatgtagtacaatcgtctacatggttagcaagcatcagttccattgataatcttctcatctcatcaagtttttctgattttgttttaacaatcattccttcttcaatttttgtggtacatgctgtttgtatatcattttttcctgatatttcaattacacataatttgcatcctccaacatcatgaagatctggatgatggcaaagatgtggaatataaatatcagcctcttcagctacttgcataattgttttattttcatcagcgcataattctatattatctattatgactttgatactactcatgttaacctccaattttcttgactcttgtacaaaagttactttatactattaatataaacgttgccataatggtaaagtcaatagtggagtgtgaaaaaaatgacaaatctatatacaatcggagaagtatctcgctatatgaatatatcaactaagatattgcgtcattatgaccatttaaatttgctaaaaccttgctatatttcaccagacactaagtatagatattttagttatgatcaactttttataatcgatgtgatccgatatttaaataaaactctgttaatcccattagaagatatcaaaaatatacttgatgagaataaggattatgataaactattaacatttttagagtctcacaaagaacagctggataaaaagatagccgatatcgaatattcaaagcagcttacagatagtatgatatctgatataaaagaattgaaaaaatctcccaaaaaaattgaaatatatgaacaatatctaatgagcagaaacttttattatcttgagctcaacacctctatttatgatatcgataaatatgtaaatagacatataactaatataactaatatagatattacagaacataatactatgtgtttattattctccttatcagaatatatgaagactaaaaatttaaatgtcaaaggtttcggtgtattctctgagaaaaaaattcctcagctaaaatttaaaaatttgcgtgaaggtcgctatattaatcaaagttttatttattcagaagaaaacactatgtctgcaataaacaacataactaaatatgctgatataaaaaatatgaaacttgatgatacagcttttttagtctcaaagatggtagatttatctgtttcctcaaagtatgattatttaatggaacttcaaataatgcatcatatgtaaatatcccaactaagacctgaacctatgcatatggatcgccgaaataggtattatgctgttattccagtttctaatgaaacatttcacaaaagcataattcttatttctagttgagatatatttcttggtgtaaatctaacttataattagtttatctatatgtaaaactaatatttctacatttcatacaaaaaatttcattttattacattatttatggaacctgtataattatgttgtataatatgaaataactaactaattataaggggagataatatgaacagagaaataatcaactcactaaaagatgtacttccattacttaaagacatgcttcgagaagacattgccatatcaattacagatactgaaaaatttatagcttattatccaaatgaaaaaataccaatgaaattaagtgtaggcgatatgatacaagaaggtgatccatatctagaagctatgaggactaagaaagttacttcaaatattttaccaaaagaaatatttggatttgtattccagggtatatgctatccacttattgatgataatgggaatgtatttggagctgttggtgttgcaaaaagccttgaaaagcaggcaattattcaggattcttcagaaaacattttcaattctatggaacaaactaatgcaggtcttgaagaaatagcaagttcttctcaaaaattggcatcaactataactaacgtagtaaattatacaaaagctactaataaaaagttagaagacatagattcaattcttatatcaattcaaaatattgcttctcaatctaatttgctagctttaaatgctgctatagaagctgctagagcaagtgatgctggccgtggatttagtgtagttgcaaacgaaatgaaaaaattagcactacttagtagtgagtcaggtaagaaaatatcagacattatgtctcaaataaaagagtcaatattacatatcgaaagtgaaatatcagaatcgagcttagctgctgattcacaggctgctgctacagaagaaataactgcttcaattggagaaataactagttccactgaaaaattaaaaaacattgcaacaatacaataatttaaatttatttataaataaacaatatataacttggacttatgcaataatccaccgaaaggagaaacattgttatttcacaggactatgaaaatttcgctgaaagtgctaaattgcaggtttccccactaaagcttgctcccaatttcattgtgacaagcattagtggaacaacctacaattaagagcttctaccagctcattttcaatgcctgttccataaaaatgtttctcctttctagtatgttatttattgcaaagtataaataaaattcttaagttgtttatctgtgtagataaccaaattaagacctgaacttatgcatataactcgccgaaatgaaaacatacttttgttccgaaaatctatgaaaatacagtaaagccttatttataaactttactgtattttatacaagctatttaccttatcgtcaagtatatcccaatatacaaggatacatattgaattaaaaataaaaatgcctcctatgataattttatttttcatagaaagccattatttctattagattgcaaactatctacatcctcttaactatttcattgataataatttttaatataatccacccattcattgtatatatcttcatcagattttccaaataccgtttcataatcttctgttttaattatctgcattaatttttcccatccatattttttatctatatactctatataggtattggcaaaggtgtaacctcccatctttgaaaatttgactgggttgctagtcttaatttctgaaaaagttggaatatgcatattgtaggtatattttttataaaaaggttctgcattggacaaatataaagccattccttcagttaaccataatctaatatgtggatttattatacttacataggcatgaaccatttcatgtaaagcagcttgcttattattatcatagtcatgaacctttcctggatttgcaggcgatgtcaatataacattcgttcctatattgtcaccaatataccagtctagtcccaatattggtcctattagcccatattttttcatttgcattgtagactgatgatcataaatataaatattaatattttgcttttcactaaatcctaattttttagctaattcaccagctcttgcattggctaactgaaaaacatccttagctgctgcttcttcatcttcataataaacattcacccattccccttcaataatatgcatatttgatgtttttaatctaagagttgggataagattaataaaaataagtaatgcagctatcgcaaaaataattccaaatactttaactgatttatttcttttcatttctttttcctcatttcttcttcattttctatagaataactaaaatatcatttataaaaaagtaaccagagtcattattttcatatgactctggtcatgtttaattattaagaaaatatttttgcaagctttaatgctagcattgtcctatcctttatttctgttttatcataaatagtacttatataattttttactgtaccttcagaaatatataagaattctgctatttgagaatttgtatatccatcagaaagcaactgacaaatctctatttctctttcagttaaattttttaataagtcaacgttatgatatttgtttttatctgtattttcatttgagcattttgacattatatttgctaatgcagtcattactttactatcaagcatgctttgaccattcataacattaaaaattccttggacaataacttttgttcctgcatcttttaataagtatccatctgccccatgcatcactgccttcacaatgttttcttcatcataaaaagttgtcaaaacaagtattttcatcttaggatatgttgtttttacctttaatatcaattcctgtcccgacattccttccatatttaagtctactaatgctatatctacttgttctttctctaaaatatctaatgcttcttttccatcatgcgctaatcctgttattgtaaaagattcattcatagataagattaactcaaggctttctaaaagaagtttttcatcatctactattaatattctaattttattcattcctatcacctgctcttgttggaatttttagcatcaccagaagtccttcttgattttctatttttaaaatcccacctatagaaattaagtagtttctgatttttttaatcccaaatccagagtccaataattcctcataatttctcatactttgtatacctgttccattgtcctgaactattatatttatattatttctatctacatttataataacaataatagccgttgcatttccatgctttacactatttgtaactagttcctgcaatgctcctattaagaaatcaattctttcgatacaaatactctgcatttttaattgctgttcactataatcgattttagctcttattttaatattaaaatcatcttttaatttatcaatatttacatttattaatttcatcacatcttctatagtttgtccattttcttttgtatttaccccacgtactgcttttctaatggcttcaaggctctcacgcattcttatattagcaaattttattttttccattgcttttttagaattcttattgtaaacttcttctgccgcatccaagctcataatcgccgccattattgtatgaccaacgctattatgtatatctctgcttacctgctcccgctcctcatattttatcttctgcaaagcaatagatttttccagttcaaaaacctctttatcttttataaacttatggtaattaagcatgagtccagaagtacgattacataatatataaaacaaacttccacagcataaatattgaagtattcttggcacagctccatatatcattatattttttaatccagtaaagggttcaacccatggttccatcaaaaaataaaagctaagtaaatgggctattaatatattaaatactgattcaataattactactataagctgtttctttctaaaatacatagatgctaatattgttggaataacaaacattaaaactgtttgaaatgttaataatgtataacatattcctgtagaaatcacagcacaagtaagtatcaaatactttatccatgctttcttaagttcaaatatatctactaaaattgttggcagcaaaaggggaattataagtaatacattcatttttaccataacattctgcacggcatcaaatacatgaattaaatttaaaaaccctgctgcaaagcaaaaatacaaaacaatacgcatcgcctttgacactgttttatttgtttctatttcatttttccacaatagctcatcaaattgattcatgttatacctcttatccataatataaacccataacttcccaaatattaactataactagtataacataaatagcagagagttatttagattatgctaataacttaccttcttcaaattctataatatatcttctttttctctactcttataattctacagcttctcctaatgattattattttattatccttaacttctttccccatatggcttttaaccttataaatgctagcttttaaatatatatttaattttttttattttaaacgtgggattacatgtatctcttacgtctaaatatatgaaaataaaattcatggaggatttttatatgcgaaaaataggtacaactacttctgctatctgttttatacttttaggtatttggattatgattaattccaataatccagatttaggaagaaaactcataaaattttggccaataattattattttaataggtatagaaattttgtattacactttaatcaagaaagaaaatgaaagaatacgaataaatggtctcgcttttcttataataatagttttcttttttacaaaaatatctatagacatttttaataatataaaacaaaataattcttcctttaatttagatacaaatttctttgataatgtctttacaagtaaaaacttacaatctattgataaaaaaatcactttagatcctattggtagtaacctaaattttgaaacagtaaatggtaaactgaatatagaaaaagcaactgacaataaaataactatagatactgaattatatgtaaagcaagataatgcttcaaaggattatgaattgaatccaataactgattcaaatggttacacactaaaaattgtagataatggcatagactcaattaaagccactatctatctacctgaaggatatgatgtttctataaaaggggctaaccttaatgtagatagtaatagtgatataagacttgatgctttaaatataaatgcatctaatggaaaatttgatttacaaggtgacattcctaactcgtctctaaagttagaaaatggtaaaatagatttaaacaataatttatgtaaaaacattgatatttctatgaataatggttcaatctctttagactcaaaagacaaaaatctatcaatcaatacagatataaaccatggtacatgcaaaataaatgatgaaaaaagagtcaactctggaatttctaaaaatatcggtactggtgagggcatagttaaagctaaattaaataatggaaccattaaaataaatagtggagagtgaagaaatggaggagcaagaattcgttgaaaaaatgaaaaccaaagatgaaaatgcttttatttacatggtagacgtttacaaaaaaagaattctctccttatgctattcctatacctctgattattatgaggcagaagatttatctcaagaggtttttataagcgtatttaataatattgataaatttagagaagagagttccttttccacttatttatacaaaattacaacttcaaaatgtatagattatacaagaaaaagaaacattaagaattttttaactggtctctttatcttttctaaggaatctactcaggatatagatgagcaaaattttatacggcaaagcattcaatctctcccactaaatttgaaaaccccacttgtactatattattatattggattaactcaaaaagaaattgcagatatattaaacttgcctttaaaaacaattgaagggagaatttatagagctaaaaacaaattaaaaaatattattgaaacggaggttccattttatgcagaacaaaagagataatcttgatactataattattaattcctttaaaaatataactgcatctgatgactataataaaaaactaatgcaaaaacttcataaaaagcagcttcctgattctaaaagaaataatctaatcccttcctacgctttaattgctgcgggtttatttattatatttcttagtattactagtcttcaggtacacattacaaactttgaatcacgtttttttgacgaagctgtagttactgaaattaaccaacattctattattaattttataaaacaattaggagagtggaaatatgaacaatagaaatagttttcttacttttgtaactgcctgcattcctggcgttggatatatgtatcatggactaatcaaaaaaggagttcaggttttattcttatatatgcttattggacctattttatcttttataggacttggtttcttatctcatttaattaaaatttgcatatggttttatactttcttcgatacatttgctgtttcaaataaaataaaacgcggagaatatgtacctgattctgaatttatttttaagaattacgttaacacagaaaattcctatagcgtaactcctacatggaacgaaagaattaacagacaaggttgggtaatcttaggttcttttttaattattcttggaatcttatctatcttaaatcaagtttttatagatagcgatatttacaaatatatcagatcttatgcttctcaatacttcattcctataatatttattgtcataggtgttttgattttatttaggaaaaaagactaaaaattgaatacctttttcatagctttttggaatcaaaatatttatgatttcggtaagttgccacataagttcaagtcttagttggggtatctatattaaagaaagcttaattcaaaaacttaacaaaagatttacatttttaaatttgtagtcactttataaggccctaaaatgctgatcaataacatttcagggccaatttcaaatatataattttattttattcaatgttcaattaaattttaagaatttatattttaaatttttgcaccaattcatccaagtcttgcgctaactctgcttgactttgagttgaatctgcgacttcagttaccgcttttgtaatttcactaatactagctaatacttcttctgaactagcggctgaatccgcagctgtagttgaaaccccttcaaaagccttattaacttgcattactgtctcattcatttgtttagcagtattaaatatatcaataaccatgtcgcttacaaactttgcatctttttcatattgtatacccgtatctagtaacaacgtgtaacttggcttcacgttatttaccatatagtctaatatgtcttgtccgctagaagacaattcatcaaaagcgtttcttacttgagcaaccatatcttgaatttgggttacagcttcagaagattgttcagctaattgtctaacctcttctgcaacaacagcaaagccttttccttgctctccagctcttgcagcctctatagcagcatttaatgcgagaagattagtttgttcagatatactaccaatagattcagccattagtttaacttctccaacaaccttgccagcttcaatagcttttataatattgagtcttttttcttcataaatttcattattttgttttatgttctctgtagctttttcttttatttcaatagctcttttacttatatcattaccagattttttagattcttcagccttgcgctctaagttacttgtattcattgctatttcatccattgatgcttgaacttcttctgtagtagcacttaagtcttgagctcccttagcaattgtttctgtagcttggctagaagattgcatcattgatgatatttcttcggtagtggctgacaagtttccactagttgagtttatcttttctgcaccgttaaatatttgtgatataagttcttttatatttttatcagctttatttagtgccttagaaagtcttcctatttcatcttggctgtctaattctatttcttgagttaaatctccatcaccaatggcttcagcaaaatttagaaccttatttaattgtttagctataacaattgagataaatgttccaagtgctatagcaagtgctaatcctaaaactataacaaatattattatatataaagacgaagtatatgtattagcatcctgcttgtatgaattggatgcgttgtcatcattcgcttgaattaaagtatctaatcccttaaataaattagctctggatgtagctatttcagtaaatctagttttagatttttcaaagtcctgtgcatctgctaactttataacatcattatagatatttctaaattcacttagattgctttttatatccttaaaagtagatttttgatcttcagttaacaaatttttttcataatcattaagtattgtatctgtatctgcagcataatcttgaatttccttttctaatccagcattttgattttccttatttccttgatttgagattttcaataaatcatatcttatttctaacgtatcttgcttaattttattaattttctgaatggataagagattctgattatacatatcctgagaatttttcttgagagtctgcatatttcttattccaacagctccaaccaatactataagcaaagctatactaataaaagctggtattaattttttagacatttttaaattattaaaccaattcaatataattcctcctaaaactacaattatatgtaactaaatatatataccgtattttaacagaaaaatcaacaattatccaattacttcactacattacaacaaaattagattatactgtaataaaattttattaagatattcttcaaagcttctgctaaacgaaaaataaaccaccacaaaaatctaatcttagattttcgtggtggtttatagtggaggtaatggatattaacttcttatcctcaaaattcaaaataactatctccttaggcaaatgaattcacctttaaatttcctaaatattattgcataaattcctttgctcttttatccgatgtctagccactataaaatttctatcgaatctcctgatctaatcactccgccttttagtattcttgtgaagattccttctgttggcataatacacgtgccaacttgattttttatagcacaacctttatggcattcttttcctatctgtgtcacttcttgaattgtttctcctatttttaatcttgtcccaacaggcaattcatgaagaacaataccttcagttgttatattttctgcaaattttccagcatctaagtcacttatccccattttaatcattttatctatgctttcttgagctaataagcttacctgtctatgccattttccagcatgggcatcatcttttaagccatgctcttctatgaaaattccttcttttataggtgtttttataacaccttttttttcactaatatttattgataatactttagccataattttatttaaatctcccttatatattctccactttttccgccggttttctttattaatctaacattttctattatcatatccttatcaacagccttgcacatatcatatatagtaagggctgcagttgttacagctgttaatgcttccatttcaacgcctgttttcccaactgttgaaactgttgcttcaatctctatttcttcttcacctatattaaaatttatatcagaccctgttataaaaatattatggcacataggaattaaatccgaggtttttttcacgcccattattccgccaatttgggcaactgataaaacatcaccttttttaataaggccatcttttatcaaatctacagtttcctttttcattttaattgatcctcttgcaatagcaactctctttgtctcatccttttcactcacatttaccatatgagctcttcctttttcattaaaatgagtaaattccataaaatcaacctccaattgctgtcatttctctattaatataatttccgttctctaattcatgttctttgggtttgcttttaatagtatcagtaattactgtcttaatatctttaccttctctaagcaatttctttaaatccacttcagagtttgagtgaagacatgactttagttttccatctgctgttaatcttattctattgcaatttccacaaaacttacatgatataggattaataagcccgactttcccctttgcatttggaagtttataatatcttgctggagaagaaatatctgctgatcctatttctattaattctggcatcttttctaaaactgtatcattagaaatatatttattagatgaccaatgctttagagtacctattggcataagttctataaatcttatttctatatcctcatattttgttaaatttataaagtcttctatttcattttcattaaagtcctttattaaaactacatttaatttaattggagtaagcccactctttttagctgcttcaataccttgaagtacatctttgatcttccctaccttagttatctgtgaatatttttcttcatttaaagtatctaagcttatattaagtctattaagacctgcgttttttaaatctttagcataatcctttaatagaattccattggtagtcatagctaaatccctaactccgcctattttacctataccatcaattagctttaaaatattttttcttactaaaggctctcccccagttatcctaactttatctacacctaattcaacaaagctttgagtaatagcttctatttcttctaaagttagaatctctttatgccacatcttatctattcctttttcaggcatacaatatttgcatcttaaattacataaatctgtgactgatattctcaagtaatttatctttctgccatacgaatcaaacataattttcctcctgcttattctttttattataagcttctaaatcctcttttgagttaagattcataaacatatcaaaagaataatcatattttttcaaaacattttcttcaataaaaataggctctataatatcaattaatcccgctatagatcttctattaagtgttataagtttttcaattttaggcagtatatctacagaataaaaggcattaaaaggctcaaccttaccttctcttttagcaacacaagcatttgctttattatttgtaagcactttcttaatatacttaatataatttaagtttatattaggcatatcacaagctataaagtatacatatttactcttactttctttaagcccaccatagattccagatagaggaccaatttcttttatttcatcgctaattattcttattccgttttctgatgctttatactcttctggcttatttgtgacaataattatatcttcaaattctttacttagttcatgaattaacttttccataattcttacttcattaattcttaaaaactgcttatcaaagcccattcgtgaactttttccacctgcaagtattactgctgttttaaaaacttctacattcatacacttataatatatttactaaattagctgcagcattttttctcttttctgaaatgtctttatctataattttagattcaactaatcttaatgcttctgtaggacatacctctacgcaagcaggaccattttccctacctatacataaatcacatttgtttgcaactaatctttctttatgttctagctttccgtctttatcacacattaagcccttttgaataactttctctccagctttatgttcaactattatatcaatggcaccaaaaggacaaactattgcgcaagatttacagcctatgcatgtatctttatttattaacactaccccatctttatttataatcgaaccatttggacatgcattagcacacggagcattttcacaatgtctacattgaattggagcacttacatctgcagttttaataacttttaagcgaggattaaaattaaccttatctttactttgtataagtatgttttcttcagaatgtgcaacaacacatgcagcctcacaagttctacatcctatacatctttttggatttgctataacaaaattattcatttatatttcctccttctttctcgaaacaaactttgtatgtagtagatgatgagatttttcaccaagaggttctattaaaaactcttcatataatttttttataaaaggattttcatgagattttcttatttcaagttcagaatcatgtttatagatacctttttttctacttaccaaggcatttcttctatctatatccaagataaacttaggttgtccaccaccacttacacaaccttctgggcaagtcataacttcaataaagtcaaagtcacactttccttcttttatatcttcaagtatttgaactacatttttcaaacctgaaaccactgctacctttagtgttatctttggcaatttcacttctgcaactctaatgccttcactgcctcgtacaaaattaagttctaaattaggaatagatttctttgtaagcatctcatagccgcttctaagtgcagcttccattacaccaccagttactccaaaaatattgccagctccagtataacttccaagtggtaaatcgaactcttcatcctttaaatttttaaaatctatttcattatctcttataagctgagcaaattcccttgtagtaataactatatctacatccttaaaaccactatcttgcatttcttctctatcacattcaaattgcttgcaagtacatggcattatagctacattatatattttcttaggattaaccttatctattttagcaccataagttttaaaaattgttccagccatttgttgtggtgatttacagcttgaaagatgatttaaaagctctggatagctttgttccataaatttcacccaggcaggacaacaagaagtaaacatcggcaattccccaccttctgttaccctttttataagctcgctgccttcttccattatagttaaatccgcaccaaagttagtatcgtaaaccctgttaaagcccaatcttcgtaatgctgctgccattttaccagctgttaaactaccagctttaagtccgaattcttcacctaaagaaactcttacagctggtgcacattgaactatagtaaataattcttcatcatgtaaagcctctttcaccttagctgcatttcctttattaaaagctgcaaacactggctccttcacactctcaagtactcctctatctcttcttttctcttctattaaatgactgttttctctattttcaaatccataagaattacatacctgtatacattgtccacaagaaacgcaaacatcataatcaatattttgaggttgtccctttttaccttgtattgcatttacaggacagacttcaacacattgctgacatccagtacataactctttatcaatatttacaaaaccaatatccataaattaaattcctctctcttataagtttaagttacttactgctcttatgtttcttattcttttttcttctatgacatcaaataatttaagagcgtctttaggacatgcttttacacaagctggttcaccttgttctttacatagatcacatttatatgcaacctttgtttccttctcttctaggacttcttcaaataattccttctgaacattttgcatgactgcttttccatccttatatttagttcccatttcaatagctccaaacggacaagctactgcacatgctttgcaacctatgcaaatttcttcatcaattattattgcattatcttcatttttaattgcatttataggacagacctttgcgcaaggtgcattttcacaatgtctacattgaactggaactgtaaagtccttctctttaataacatgtattctagaaattattggtgtttgtatatttccaacagtgactgattcattatgagccttaaagcaagctatttcacaagccttacacccaacacacttattagcatctcccacaatgaaagaattacaacttttcatattaatttcactcctctgtacattcaaggcactcccaagaaaataatagaccaccaaaacgccgtatgacctaaaatatcaaacatattgatctattattcctggggtttgtacctaatacttatagatatccaaatttaaacatagacttatgtagtatcttccccaaatcatatatacccacgacttaaatttcacttatattttgaaatatacacataccagaaataggaggtactcttttgtgtagtattacattagagaacaagttgctggcatttcttctgtagaagttgttccatttttgcttctcctgaagcttgtctttaggagcatgcagaaatggtgcaacttctactgttagaaatcctaaacttattctcagtaaccgaaacaactgagtacctgtcatttcggtgaattatttcataattctatatccattagcatatatattcattttgttgcctcttacaaatccaactaaggtaatatttaatcttttagcaagagctacagaaagacttgtaggcgctgatttagatataattattggtatttctagctttgctgcctttaatatcatttcaagagagactcttccgctaagtataactgctttatccttaaggaatatgcctttcataagtgattctccaataaccttgtccaaggcattatgtctagctacatcttcatacactacaagcatttcattgctatcacataatgcaacgcagtgaactcctcctgtgttcttaaaaacatccgaataatctaaatttgttctcataaattcgaatatcttttcagtatgcattttagcatcactttcaacaggcttgcagtttaaggaatctaagaaattatcaattccatcaattgattgatcctttatactttctaaatcaattttcttagagaaaaagctttcgcgagcagcatctttattcttagtctcaacctctgcaattcctttttcttcatttaaattaaaagatattatatcttcactagtatttattaaaccttctgttcttaaaaaaccaactgacaaagcttttaagttttctgggctacataaaagtgtagctaatttttttccattaagaaaaattgttagtgggtattctctaactagaagttcatctacatctgctttaaaaatgccgtcttctattttaaaaactttacattctaatgttttttccattatttatttctcctttgcgcactttaaaaataatcttatcctcaataaattcagctatcttattcatatcattgatatctaattgttctatgtctagatttagcttttcatcagtagctactgctaaaaatttcgttctatccaaactctcattttcacatagaagcttttgatctacttcttttctatgaacttctattttagggtatccattatttttatatccctctatgattaccaaatccatacctacaaatagttctagtatttcttcaagatctttttcttcctttagcttttctatcatagctattttttcttttgatgaaataaccattttgtctgctccagcttttacaaatctataactgtcttttccctctttatcaattccaaatttgtgagcatcatgttttaggactcctatgttatagtttttctcttttaatataggtattaatgcttctatgagcgttgtcttccctgttccagatttagttgcaactatagatattactttaagttcacttgatttatttaaagatgaattttccacttaaaacttctcctgcctttttatatccaattcctgctggcattattattattccatttgccttactcatagtaattaactgattagaactttgagatccaaccttatatgcatataactttccgttctcagcttttatatttacatatatgtatttacttctgccttctttttctttaaagtcttcagctagtataacttggagagtatcatcactctccatgcttttaccaagcattttttcacaagctggctttacgaattcttcaaaggtagttattgcagataatggattgcctggtaagctaaaaaatagttttttatcaataactgcaaaacttattggcttccctggctttatagctacagattgaaattttatatcagcatttatttcattcaatacttgttctacaaaatcaaaatctcctacagaagcaccacctgaagttataactatatccgatttttctaatgcttctttaactttgctttttaaagtatcttttttatcttcaacaattcctaggcataaagcttctaatcctaaattctgaattaatccttttagtgaatattcattgctatttcttatttgtccaaacttaggagtttcatttatatctacaagttcatcacctgttgtaagtattgatattactggatctctatgaactttaattttgctataacctaaagaagctaaaactccaatttcagttggcctaatcattgttcctttccttaaagcaatatctcctactttaatttcttcaccaagttttattacattgcatccatttttaactttctcagaaatataaagagtatcttcacgaacttctactttttcaatttgtattactgcatttgcacctttaggaactggtgctcccgtcattatcttcattgcttgcccgttttttaattctttatcactaaactctccagcttttataagatcaactatctcaagctttattggaactccatcttcatataaatcagtatcctcactttttatggcatatccatccattgctgatttatcaaatggtggaagattatctctagaatatatatcttctgctagtaccttatttaaacaagataaaatatccttctcttcacattctaaggccttagattcttccaaaattattcttaaagcttcttctacactaatcattgctgtttcctccctataatgttcacctgatgggccctattgggtaaacatatctcatcatatgaagtaaaatatacaagcatacttatctattttttgcttgtgccttatcattttcttttaaattcctaatactatttttcagatgttattctcattttctttcttatgttttcatattcagttattatatattcctcagctgacttttgatcttcgattctttcaaccttaattgcacaatatttaaattcaggagtttttgaaataggatcaaggctatcattagttaactcattgcaggcaccaatccaccattgatatgtcataaaagttgaaccttttttaactctttcagtaataagtgctcttgatagtacacttcctcttctagatgttattcttacaagttcttgatcttttatatttaactcttctgcatcttcaatactcatttgtataaatcctggttcatctgcaagcttttgaagggcacgacaatttcctgtcattgttcttactgaataatgtccaacttcccttactgttgataaacttaaaggatattcttcatctgttaattcaactggtggtctccattcacaagcaaataatcttcctttaccgctaggagtagtaaatttatttccttcatataagtaagaagttcctttgtgatcttctgtaggacaaggccatctaacaattccttgttcttcaatctttttataacttgctcctgcaaacttaggacataggcttctcatttcatcccatatttcttctgtatttttataattcattgggtaacccatagctgttgctactgcacttattatttcccaatcagtttttacatcccctaaaggttctactgcttttcttattcgttggaagcctctatctgctgagctataaactccatcatgttccccccaagaagttgaaggtaaaataacatctgcatgaagggctgttttattcataaatatatcttgtaccactatgaattcaatcttgtctaaagcttctctaagttctgctgcatttggatcactttgaactggatcttctccaaatatatagtaggcttttattttatcttccttaagaactaattcaggcacttgagttaagaagtatccatttttatctgaaagttcaactccccaagccttttcaaatttttcttgtactttcttatctgttacaagctgatatcctggataattattagggattgtccccatatcacaagttccttgtacattattttgtccacgaactggtccaattcctacgctcggtcttgcaaagtttcctgttaaaagggcaatagatgcgagcccccttactacatcaacagcctgtgagaattgacaaacacccataccatataatattgtggcatttttagcctttgcataagtcctcattgcttttcttatatagtcagcttttacgcctgttatcttttcagcatattctggagtatatttttctacttctgctttatacttttcaaaatcctcagtgtatttttctacataatcatgatcatataaatcttcatttattagcacatttccaaaggcattaactagagccatattagttccaccctttagttgaagccataaatcagatagtcttacaacatctgtttttctaggatctgtcacaattacttttgcacccttttctttagctttaactattcttcttgctactataggatgagtttctgcaggattatatccaaatataaataaaacatccgaatcttcaatttctggaatagaatttgacattgccccatcacctagtgaataagtaagtcctgcaacagatggtccatggcatactctagcacaatgatctatattgttagttccaataactgctctcataaacttttgcattacatagtttggttcattacctggacctctagctgagcctgtacccataattgcatctggtccatatttagcttttatcttcataagattttctgctgtaaatttaatagcttcatcccatgaaacttcctctaactctccattttttcttatcataggctttttaattctagaagttaatatttgagggtcatttaagaaatcccagccataatatccttttaaacataattttccttcattattatcaccatttgcaggttccgctcttacaatttttccatccttaactacaagatataaattacacccacttccacaataaggacacaccgttaacactttcttttccatattctaatacactccttttaatatcaaatatctaaaaaaacaaaaaaccagtacaagggctgtttatttcaacggtccttagtactggtttatttaaaagctaaaacataaactcgacactattaaaaaaatagcaagtaaatatgctaatatattttctttacagtgcctaatatttttcttttcaatctaaccttaatttattaacttttctaattttaatctattaattttattgttataactactgttctattatcattttctatattacaaattttccagctataagtaaagtctttttttaatatatctttcacttcctggaggaaatttttttcaagatgaggcttcattatcttccaataatctgctaccacattgacagcaccttcattaaccaaaatttcactaagatttgaaagtatcccttttatgtctacaattattgtatcaggagaatcaaccttcactttgacatactctggtcctctacctctgtagtatttcacaattttaactgtaacttttttaatttgttcttgcaattcaagatttatagcactcattttctatttaaatctcctattttatcaacaaaatccagttctataaattttaccttgttgcaatattttagtcaattcagaatattaatgaaatttttcatttaaagctttatttcgacatatttctaattaattatcacttatcttaagtctttcattttttcttcgatgggcttataattggtattattaatttaatctataactaaactatagtataattatttaaattcaaatgtttattaatataaattttccctcaggaggtaattataaaatgataagtacagctatactaactataagtgataaaggctacaacaatcaacgagaagatctaactggtccagctataaaagatattctaccaagtgataaattttctgtggattattacaagataatccctgatgaagttgaaatgataaaagaagaattaatatatctttgtgattccttaggtattaatatgatcttaacaaatggtggaacaggtttttcaaagagagatgttactccagaagccacaacaagtgttatcgaaaaattagtgcctggtatccctgaagcaatgaggagtgcttcgctaaaaataactcctaaagctatgctttcaagagctgttagcggaattagaaaaagtacattaatagtaaatttacctggaagtccaaaaggcgctgtagaaaatctagaggttatactgcctgctcttcctcatggaattgatattctaacaggtgaagcttctgaatgcagtcgataatattaaatttagatttatacgataatccaccgaaagtagaaacattcttatttcgcaggactatggaaatttcgctgaaagtgctaaattgcacaacagttcaataaaaaaacttgctataaaataaaacacctacgaaaatccaaattttagattttcataggtgttatcatatttttaaagtttaaatttacgtacctcttgttttaagttttccgaacttattttagcttttaatgcctcctctgatacgtcattagattgagtagttatatttgagactctatttgctatatctgaagctccctttgcaccttcattagatgcatctgctacattttctatggtttctagtatattttctacagataataaaagttctttcgacgttatacctaactctgaggaaaattctttataatataacgcatcattattatattcatgacttgcgttaactaaagtttcgtaatcttttaatattctgtcttccatgaaactaagcatattattagaattattagtcaaatcttcaacagaagataatataattgatgttgtattttgcatcttatttatagtttcattagattgttctgccagccttcttatttcttctgctactacgctaaatcctttgccagcttctccagctcttgctgcctctattgctgcattaagcgcaagtaagttaatttgtgaagttatttgaagtatagattccgataagacatttattttctccacagctttagctttttcaacagattgcttcaatttaatacctgtttctttaaacactttttcagtttccctttgattatcttttgaagttaccataatatttttagcttttttacttacttgaattgatttcttttcgatgtattgtgatttttcagctatagaattaactataattcctatttcctttgaagttcttgacatctcttctgcagatactgcactctcttctatactcgctgaaatttcttctgtaattgctgaaacttcttctacatcattatttagatatttcactttatcatttactgtatcattaacagtattcatatctttagctacaattgctacatcgtttatcagagcttttaaagaattctgaaccttatcgattgatatagctatatcctcaatctcatcctttgttcttatatttatattactagttaaatcaccatcactcattttacctaaaacactttgtatttttacaatattattacttaatttcttagagtataaataaatcataacaaaagctaaaatactcacaataactatcgttagaattgttgcttttagcaacgcacttctcattccttcaaacatacttgagtctacatctacaccagcaataactataatctttccttctgaatttttaattggtgcataagcagaaataaacgtaccatactcatctgtaaacgattcatttgttactacaactttatcattaaaagcttctttcatcacactatccatagtatagtcttctaaaaattcagatgcatctactgaaacatcaactaaaaacttagcctgtgacccttgaactctttcaagtgtataaaaattccttgcaacactttttgattttgccaaactcattgatttcaatacatcttgatattctacactgtcatctgattgctcttttataagcttttcaagcttgtctccatcaatggaaacagttaaatctgaaatacattgagtaactgtttgcctaagttcctttttaaatttttcaaacataatcagatttactgaaactaatattatagctatagatgataaaataaccaacatcattcctaatattttcttcccgaatttactcatactccacccctaaaatattgttctttatataatttttataaataataaaggccaatttaaactaatcaaaaaagaacttattagtttaaattggtcgactgcacagatagctcgaaattcttaaaatatccacataaaaagaattcttcatagctctcaattactatatttcattaataattgtcatttttttaatatatatgtcatattatcatatagatattaaaaaatcaataatctaactatctttttgttaatttcctaaatatcttggtttcctaagaaatagtttaaacataatctaaagttcataatttttaactaaaaatcttcaaaatacaaaaatacccccacgaaaatccaaaatttagattttcgtggggtttatggcggaggtgaaacgtgacctttgaaattcaccatttactctatccttctttaatatataagttagtattcagcaagctcaaaaaaagttttctctctgaattacgtttgccctatgatttaatttatatttatagtcaacactagtgaatcatcttccattacttcttcactttctatgttcatattagtttgctttaacttctcaacaaccttattataagtataagattgaacattctttttatattcttcatctatagcatttaattgttcatatatgccccttatttgagagtttcctctaattttcacttcatagttagtactattttccttataaaaaattaatgtagtattttcaacattacattgtatcgttccatttccagcaacctgtgtgtttattccataatctcgaagcgtttttgcaagcagcttttcgtcaacaaaattcgtcggaaaactctcctcttgaaaattcccctcatcctttttggctagattttcaatattatactcgaaaattttacttttagcaacgccttctacatcattaatgaatttcttgattgtttctactgaatcattcttggaaaatgttgctgccaaaatgccattggctttttctaaaaaaaagaaatcccttcctccattaaaatttgcttttagaagctttccctcttttattacatcataacctgctttttttactagaactataagttcattttcatcctttatatttgtttgtatttttatttgagatgattctatccaatcatttagattcttatctccaatcgctgctctaagtactaacactaatggtattaatgtaagtgttactgacataattattcctccaataaataatatattattcttttaaaaatctattgttcttccacctctagctttttttattgcactttcgctattattttcatcatcagatttactttcacctgtatcttcttctaattttgatgatatggaattatctttctttaaatattcacttctatcttctttagccgtagccgcaacagctcttacatttgcccattctctaatacttataatttgttcagcttgagtaactgaaagaggtaccgtatttttaattactttttctaaatcactaacatgcaatcctctttcttctgaaaatgcttcgaataaagctgctactactgcttgttctatttcagcaccaacaaagccttctgttaaatctgctaactctgataacaactcatcagttatactcacatctttacaaacttcttcattggtcaatctttttttaaggtgtaatctaaaaatatcctttctttcatttttagttggtaaatccacaaaaaatatttcatcaaatcttccttttcttaataattcagatggcagactgtttatattatttgcagttgctactacaaatactggtttagttttttcttgcatccaagtaagaaatgttccaaagattcttgtagacgttccactatctcctgaagaactagaagcaccactaaatcccttttctatttcatctatccataatatagatggagctactgcttctgctgtttttatagcttttctcatattttcttctgagcttccaactattccactaaaaatttttcccatatccaatcttaaaagtgggagctgccacattgcgcttatagcttttgctgttaaactcttaccacatccaggtacccctgttataagtactccttttggggcaggaatattatatttttgtgctgaatcaagccatgatttatttctttttgaaacccatctttttaaattttctagacctcctacgtcattcatattcagatcacttttttcaaattcaagaattcctgttttcttaattacctggcacttttcttccaaaataatttctagatcaccaatattcattctaccatcttcaaccatagctcttgcaaaagcattttccgcttcttgaagagttaagcctaaagctgctttacataatctttccttttcagactcatctaagtctataattattcttccaccttgtttattcatgtcaatcatttcattaagtaaactttttatttcatctatagttggaagatcaaaatctaaaatagttacatccttttgaagctcactcggtaacacaacagttggagataaaaatactacacttttaggtctaggactattttttagaacactaaccaaatctcttgtttttcttataagtgcataatctacatttcttccagaaacaccaaaaaacacatggaaatctttaagtataaatattgctggttcttcacatttttcaatgaactctaaagcctttattggttgcttggtttcttcccttccttttgctccttggatgcacattccatcagtttgactccagatataagttatcctttgagtcttgataagattttcatctttcaccacagagtcaataacagatattgctctttcttcttcccacgttgatatatacacataaggaaatcttgctttaaataaatttgccaaatatttttttgttctttctgtactattattttctaaactcattgtattcctcatctccccaaattcttaagtttctttttatatcttcaaagtctcccattccattaataaatacacttccattttcattcaccctaacttctactttgttttttatagaacctaagttattctttaaatatccatatttaggtgataaaaacctataattttgatttgatgaccctacccaaggccttgatatatcaaatttatttttttcaaaaggcccatctataagcaaatcaattattgataataagtcgttccattctttcttatttgtatttaaaatatattcatatgtatatccagtaaagcttaatattgttaacccagcagcttttatttttctccctaattcatataaagcttctgcttgagcaaatggttctccacctaaaaaagttactccttctatttcatcacattcttttatcatactgaaaatttcatcaacactaaaaagctgaccaccatcaaaggaccaggtttcctttgcaaaacatccgtcacattgtatagggcacccttgcacccataaacaaaaacgaattcctggcccttcaacttttgtatttcttaaaattctgtatactctgattttcattaaaaatctaccattcttcctgctcgacctgtattaatattggagttattcgtactttcattttttttagtttgattacaaattaacattgatcttattttttccgtaaagtgtggttttatatttaatacttgaataaattcatcaacagaattgaattcattattatttctaaaattaatagcttttttagcttctattattcctacaccaggtaattgtaataattcatcttcagtacatgagttagcatctaataatttttctgttctgcttgtttctaatctctcttcatttttgcgttccgaaacattattttttactgaattattttcagtactatatattctagtttctttattaatgctttcttctctatcatatacttgttcattttgattaaaattcatctggctattaaatgtttgttgattctcattaatgtgttgattgttatataaaatattagcattactttgatttctatcttctatattatttgagctataatttcctttatcataatttacgccatattccttggcaattttttctttcaagttatttgacacaatttgctctgttttttgtttttccataacttccaatctcataaggtactcttttcttatagaaaaagagtgaattatacacgctatataagttccaaaaaaaataatagtcattgcatcacttataatgctctcttttcctacctctgctaccattaacatagatatccaccctatagctgtgtatattaaaccaagtctataccatttttgtactcgcgtttttcttcctgccaaaaacatgcctactccatttactaaccatatgaagctccatataatccatagagaatgtactatttcccaccttgttcctttttccgtgattttcatattatattcccccattaagctttattgtatcttcttcattaacttcaattttttctgattcataatattctggagtatattctgaatcaattacttctgcgtctaatatatcttcaataatctttatataatcggtacactttttacctttaatcccttctacattagcctgaacagtcccatctggatatattcttaattgtattttctttcccaaaaaaacatccccttattaacttctatttcttacaaattttataaatttataatatacttttagcaaaaaaccctcctgccaattatcttgatatgcttatttttaattttataaataaaactctttattccaaataattacttaataaacatattaatatatattataccatgctatggcataatatttaaataccaccatgagttttgtatttacattttagactaaatccttcttttatataatttttatttaatatcagctattatatttagttattagttccaccatttaatactgtatataaaattgctaaaaaaatttagaaaagtccaaagtaataaatatttacaaagctaccgcaagcggtactcacatagaaaaaatttttaagtcattaaaaatatcttaggaatctgttttttattcaactgtaaaattattcaagcaaaactgcattattatagctttaagatttttattccatttattttcattataattataatgaaaataaattacttaggaaataagcatacttaatacaaataactatccgtaagtcagatgatttatcataataattataaatgccattggaacttaaaaaagatgactcctgttcaatacagaaatcatcttcttaatattgcttacgcttttttaaactgtccttgtcaaaaagtacattttaatatgataagtcaactttaaagtttcaatatacctaatttttgtaaagttcgcgtttatttatagtatagttcactttaccaatattaagtgataaaactttttcatcctttaaatttatcagtttaagcaagatgctagaatccccgctccaagtaatcctgcatcatcacctattttagccaatttaatatttacattaatattgttaaatactcttagcttaacttcattaattaatttttctaagtaattagaattgtttaatataactgatccgccaagtactataacttctggatctacaatagttattatattagcaattgctttagataaatttacagaccactcatttataacctctctgcaatttacttctccatccttagctctgtcaaaaacatctttggcagtgagttcctgtcctaacttcttactagcaattctagaaatacttactccactgcactgcccttctaatcctccaacgtttaaacctgcgtgactatactcatcttcatttattatcatgttgcatacttctccagctatgttattaaatccattaattatctcatttttataaacaaatccgccacctactcctgttgatagagtaatataatatacactttcagcatttttagctgatcctatcttagcttcacaatatccagccacatttgcatcattatttacatttgtaggtaatttaaaacgctcttcaaagtatttttttatttcaaatccttcccatccttttaaattaggtggattaattattactccatttcttatatctaaaggacctggacatgccacaccaatagcctgaatgttatatgtattccacttttccctaattatttttattaaattatctacattatacttcgcacctttttcaacaatattatctattttaaatttatcaattaaattatattcattatctaaaatagcggctcttaagttggtacctcctatatcaattcctaaataataattcatcttgacctcctaaaatattaacaaaactatttgattaaataaaatcttctatgatattttttaattgcgtgcttacttaaaattgttacttcttattcgtcctaagctttttataagtttattttattaaaagccgaggatttatctcggcttttttactattttttctttaaatcattgatttctttctgcatatataatatctctttagctaaagataaaattatttctgatgccattaattgatcttcagcatgcataagtattagtgaaagctcttgcctatttccttttgcttcttcttgtataagttgtgcatgtgacttatgaccttctctcataaacacagatgcatcttcaagcaacttttctgcctcttctacatttccgcctcttcctttaattaaagcctggattcccatactctttgccgttccaacattactaataatattgaaagctattaactccattccttccatcttaaaccaccttatttcattaaatctatagcgaaagttaaaactttatcagcattcattctgccataatccaccatactaataacttctactgatatcttattttctactgtctcttttatactatctttcaaaaatccaatttgaggtcctagtagaattacatctgcactttgccaacattgagataaatctgtcgaaggtatagcttctattgttacttctatacccttttcttttgccactctaatcatcttttgtacaagcattgatgttgacattcctgcattacatactaataatatttttttcataacaaaacatctcccttttatctttatattacttctatttattcttcaatattttttttctctgaaacctttaaaaaaggaatatacagtaagactgtaagtgcaatcataattatttgaaatactgaagctctccaatctccaccggttgctagaaatcctgataaaattggtggagtcgtccaaggtgtttgaattactactggtgacatccatcctgcctcagtcactaagtatgcaacagttaagcaaattggtgaagctaatacaaatggaatcattagtgttaaatcaaatactattggtaaaccaaatataactggctcattaatattaaatatacctggtgctgtggaaagtttagcaatatctctataatcctttctctttgagaataagaatatagcaattaataacgcaatagtattacctgatccacccattactccaaatgtatccttaaatgacatgctaattatgtgagggataggttgaccttgagcaaaagcagtcatattttcattcatagctgtgtataatactggatccataattggcgcaattacccctcctggatgtatccctattgcaaataataaattagacaacagcattaatattataaatcctggtaaactagtaactagagctaccaatggtctttgtattgtttttaggatcagtgaatttatatctgtcccaaaaagttgttttattgcaaatgacactacagcaaaaattagaatagtaatcattataggtattaaactattaaaagactttgtaacggctggaggtactgcttctccacctatattaatcttaagtttttcatttttagatagccacataaataattcagttgataatagtgacgttataatacctacgaacatcccacctgaattagtggaactatacgaaataactcctgcaactttaactgcctctttaactcctacaggtgtagttgaaatcacaaatggtaataaaataacaaatattgaaatagctagaagcgctggtgctattggattttcaaatttcctatttattgctagatgatatgcacatgcacccgctagcaatactgctaagaaatttaaagtaccattattaatagatgttccaacatcttgccaagtagttaatgttgctggattaattattttagacataaatcctgttggttcaataacaacatagttaatgaaaatcattaagcctgcaataataatgaatggaattagtgatgcaaatgcatctctaagtgatctcaagtgtatttctccacctaacttttgcgatgctttccctagtttttcaaaaaatttgttcatcaatattcccccttttttattcttcaaaaccattatttgtagctaacagtttataaaactctccacttttctttactgttctcttttgagtttttaaatctaaactaactaaaccatacctatttttatatgcattcatccatgaccaacaatcaatgaatgtccatagatgatatccttttatattacatccctcttcaattgctttatgaacatattttaaatgtcccttaataaaattaattctgtattcatcattaatttgtccattttcaataaaacgttcttcatctgtaacacccataccattttcagatataaaggcttctatatttccataattttctttaacatcattgcaaagatctagtattcccttctcgtatatttcccatcctctataattattaaactttcttcctggcattatatatggatcaaaaaaccattctggcataaatggagaattaggattcacagcattttctctagcctttgctcttcttggttcataataatttattcctaaaatttgagctgtattttctttaattatttttagctcgtcatctgtatatataggaatttggttatattttttaagagtgtctactaacttcttaggaaattcgccttttacacaaggatctaagaagctcctattataaaataagtcacaatattctgctgcctcgacatcatacttatttgaacttcttggataagtaggactaagatttaatattactccaattttagattttaaattgtgttttttaaatctttcaatggcttttgcatgtgcaagaattgtattaaaagctacttgtgcacccctcttgaaatctattatgtttggatagtgaaaatcttgtaagtaccctccaagtactggtcctaaaggttcattaaatgtaaaccaatgctcagctctgtctccaaataattcaaaacacttatctgcatagttcacatatgcctcaacgacctctttactttcccatcctcccttttcctgcattactaacggcatatcaaagtgatataagttaataaaaggctttacatcattagctataaatgaattaattacattattataaaattcaactgctttttcattaacttctccatctccatttggaaataatcgagcccacgaaatagacattctaaatgaattatgtccaagttccttcattaatttgatatcatcttcatacctatagaagaaatctgaagtaatatctggtccaacttcatcatagaatctgtttttttctaattgaaaccaatgatcccaaatagtttttcctttatcagtattacctttgccttctgattgctctgctgatgaggcactcccccaccagaatccttctggaaattcataaaattttttcataagtaactcccatcttaatatatattatgtttctcgtctcgagcagaaaacattttcaattatgattatatatgtcctttcaaaaataatcaatacctttttcaaaaagatatataccttttataaaaagatatataaataccagtatatttttatttatatctgatatataatatatgtgtggaaacaattgagaaaggaagattatatatgccgcctaaatacaaagtagtatatgaagatataaagaataagataaataactatatttataaaaccaatgaaaaaattccagatggagattctttagctgaatgctataattgcagtaaacttacaatagctaaagcattagatttattagttcaagaaggtatgctaataagacgacagggctctggtacttatgttaaagaaaatctgtccaacaggactactatagaattagataatatttcaggttattctaaaaaatttagtacagagcatctaaaatcaactgtgatagatttttctattatcacaccacctaaagaaattgcagaaaaacttaacatcaccgatgaatatatatataaaattttacgattacgatctgtggataatgacccacaaatactagaagaaacttatatgcctatttatgttatacctggactaaaagaacaccatttagaaggctctatttatgattacataacaaatgaacttggatttaaaattcaaagcgcccacatctctataaaaggtgatgaggctaactctaacgataaactttatttaaatttgacagagtctgactttattatagagcttgagaaaatatgttatttagaaaatggtaagattttcgaatattcgaaaacgcaccatagatatgacgttttcaaattcaatactgttttagtaaataatatttaaattaattccttcttctgtgtagcttattgtattatcatctaattaaaattcatgatttatggactaccagtgacaataaaaacccacgaccaactgtaagcagctatttaagccacatacaattggtcgtgggtttcatggtgtagatgaagagtgacccttaaaatccacaaaaaaaattatttattaacacgaactcaattcatgtttacatataataatttaatcgatattattctcattaattttatacagaagggctctccgtgaaatctgaaggagctttgcagcctgtgtgcggtttccacctgttcgttctatagcttcggatatatgacgcttttcaacttctagcaatacttctcgcaaaggtttgaaagaatcatctcccagaataatggtaccatccgcttctacatcttctacttttatgctaagtggaagattttccggcaaaataacacgggtgttgctcataataatagcgtgttctactgcattttctaattccctgatatttcctggccaagaatagttacgaaaaatatccaaaacctctggagcgaaaaacataccattccgtcctacttctacagaaaaacgttttaaaaagtaatcagctagtaaaacaatatcttctcccctttcgcaaagtggaggtaaacagattgaaacaacattaagtcgataatatagatccttccgaaaagacttttcagatatctctttattcagatcacggtttgttgctgcaataatacgtacatttgtatgaaatgtttttgtaccaccaacacgttcaaactctttttcttgcaacaccctgagaagttttacctgaagatttggactcatctccgcaatctcatctaaaaaaagtgtcccaccttcagccagttcaaatttccctggtttttgaaaaaatgcacttgtaaatgctcccttctcatgtccaaatatctcactctctaataaaccttctggaatcgaaccacaattcacttgaatgaatggcttttctctcctgtcactcgcatagtgaatagccttagcaaccattcctttacctgtcccactttcgcctgttagcaataccgtagcttttgaattcgctactcgtccaattattttatatacttcttggattttagagctttccccaacaattttacctggggtcattgctgtcattcccatttcttgtacttcctgcgtaaggtatacaacttctttagtcaattgttgcatgcgaatagctctacttacaataattttaacttcatcaaggttaaaaggctttaatatatagtcataagcaccgtgtttcatagcattaactgcagtttccgaacttccaaatgcagtcataagaataattggcaagttaggcttaattttatgaatttcataaaatgcctgcaacccatccacctctggcatacggatatcaaggatagcgacatcatagtgattttcctgcgccatacaaagtgcctcttttccatttttaacagtatctacttcatatccaaccttatttaatgctgtttgaagtaccattctcaagcttagctcatcatcagctactaaaacacgaacactttctgtcatattgtaatcagcctttctttttataaacatattattaatctactttagttatacaacattttacagtatatatcaatattcaaccaaattccatatttaaatcaaatatttaaaatatggaatttagttgaatataataataaatattaaagtaaaatttattattataaaacaataaacttttcacaaaaaacttttcatttttaaaagaaacgcatctataatttaaatttacttatagcttcatgcaagtcttcagatagttttagtaagttctggcttgatccagcaattttatacattgatgcggattgttcttccgttgttgcagttactgtctgtgttttctcttcggtgtcaccctcaattttttctattttatcgattgaagcaacaatcttattactgtttgatgatattttgttctaccgtctcagatacacttcttacttgggctgctacacactcaactgcctgtgatatttgactaaaggccttacctgttgaatttacaacatcagttccattttttacttcttgcatcccttctttcataagagtgagattattttttgtgaactcaatgatgaaattctatttattttgagctaccttaccatcagtgcaatattaatagcattagcttgtcatactattaatattaacgtgctctgttatgcaacataattttagatattttatctatttttaagattacaagtcttaaattgcatttaatatatttttctatatttaaatttacactatacttccttaattccactttcataaggcaagtatagtgtaaatgtacttccaataccaactatactttcagctcgaatgtatccttggtgaatttctatgattttgttactaacagcaagtcctagtcccgtgcctgtatcctttgtagtaaaaaaaggatcaaaaatcctaggtaaactttcctgatcaatcccttttccattatcttctatgataatctcaatccctttaataaccctttgtgttgtaactgtaatttttccgttttcttgaggcatagcttgtgtcgcatttagtaataggttaactaaaacttgtttaataagctgagcatcaactgaaatagtttcaattgattgatcaaaatgtgtttctaaaacaacaatctccttttttatactcggtaaaagtaaaaaaagagaattttccacaagttcgttgatattaattgatgtcacatagtgttttgaaggtttagcaaaatacaagagatcttcaataacgccgttaagacgatcaacctctttcaatacaacgtttccaaaaatccgtgtcgaattatcctttggcaattcatccaccaaaatttgcacactccctgaaatagctgatagaggattacgtatttcatgagctacaccggcagcaagctctccaactgcggcaagacgatctaatctccttacataatcctcaaaagccttatgctctgataaatctttgaaaactaaaactacacccaatacattattattattacatagcatagatgtgctgacactaatgggaataattgcaccgtccgaacgagtaaattctacttcatatccaataatttttttaccgacacgtaaagtttctagcactatgtcaagaactttagcattcccggagaatagatctttatagttaattccaatcacatctttatttaatcccataatagaccaagcagcagcgtttatctctgttatcttttcatcattatcaattgtaataattccatctaccatactctccataataatttctgtatgtgaacgtgtattcattagactttgagccattccattaatagcagaagcaatctttccaaattcaccattaatttctggcaatcgttgacttaaatcattgcccaaactagatagtccttgaataataccattaacggaattagaaactctatttgctaaagtcatacttatacttagcccaacaactaaagcaatagccaacccttcgtacatcacaatttccatctcatttatttgacgctctatgctttcagtcatttcattagcccatacgtatccgattacattattatttcgaatgatcggaatcatggcatttagaatgttccctctaaccatcttaccacttgcagtcaaaggtatccccttttccattacttcccggcccaaatgttcttgacttattgattgtccaaccgttgtgtcatattcagaacctggtccatatgtaataatacaatcgagatctttagaataatacccagctcctactccgggatttcccgaaacaattttttccgtaactcctgatagtctttgattaagtagtcgtaccttttcgtcatgcgaagcactcttagcttctatagataataaggattcaaaatcaccttccatactagcatccaaagttcttgctattccatagagcttgctttccttctctgaattcatagctttttccgcactataaattagtatatagccacttccaataagcggtactactactgcaagtgcaagaataattataagcctataacgcatactaagaagcctcatcaggatacctccataaatattaatattttatacatatatctcatttataattatgatatgtctacattttagtgtcaagcaagggcgaatccttgcggcataataattagaataccccactaagtaagcatttgtgttgaaatctacttagcggggtattcatgaacaaggtatattcttggaattgcaattaagaacttattaaatcaactatttaaacatattttcatccataagctttaattcaggagatattattggcttaaaatccatattatctagaatatccttttctaaatttattcctggagctatttcttctaaaagtaacccctctttagttaacttaaatacggctctttctgtaacataaaggacagtttgtccaatgcttgatgcatattcaccactaaaagtaatttgctcgacagcatcaacaaatttcttagccttaccttcattttctattattaatttaccttctccaatttttacttttaaaccaccagctgtaaatgtgccacaatatattaacttcttagcattttgagttatattaataaacccaccacaacctgcaatcttaggtccaaacttactaacatttatattacccgatttgtcacattgtgctaatcccaagaaagctacatcaagaccgcctccatcataaaaatcaaattgactggattggtccagtatgcaaaccggatttgttgaagctccaaaacttagtccacctgctggtacgccacctactccacctggctctacagttaaagtcatttgatctgcaataccttcttcattagcaactatagctattccttctggtatgccaatacctaaattagtaacagcatttggtactagttccttagcacatcttcttgctattaccttcctttcattaagtagtaatggttctattgaatccactggtaccttagtatctccacaatatgctggattaaagttttcactaaaagtttgcatttggttttctgttgatgcaacaactatagcatcaacatatattcctgggattttaacttttcttggatcaagtgaacctttagttacaaccttttcaacttgtagtattactattccccctgaatttttagcagcttgagccattgctgttgcatcaagtgttaaagcctctttttccattgttgcatttccgtcttcatctgcataagtagcccttaaaagtacaacatctatcggaaacgctttatatagcaaatattccttctcttcaatattaactacttttacaatatcctcttttgtaatttcattaagtttaccaccttcaattctaggatctataaatgttttcaatccaacatgagtaattgttcccggctttccagctgcaatgtctctatacaaatgtgatataactccttgaggtaaattatatgcttctactttattttctaaagctagtttttgaagctttggtgtcaatgcccaatgtccccctattattctgtgaactaacccctcataaccaagatgatttaatcctctatctttaccatcaccttgaccagctgcaaaaactaatgttaaattgttaggaacatgcctttttaaatattgtttttctatttctaatgtaatttgttctggatgggcacatccaacaaatccacctactgcaacagtagctccattttttattaaatcaaccgattgttctatagagattacctttgacttcataattaatccctcccactttatcttactttatttattcaacagtcttaatttcttcaggttactttttagcatctctatctaagaaatataaaagtacttccgcacgctctttttctttactttctataaattctggtgaccaattatagaatccttgtttactcttctttccacaattccctgattcaaccataccttgcaataacttagatggctcagtataactgcacaaatctttaaataagtatgaagaaatattattgaatatatctaaacctcctaaatctgcactacataatggtccagtaacaggaagccttcttccatgaccatactccatagctttatctacttcctcaggctttgcccagcctttttctactatatataaagcttctctaagcaacgctaattgtaggcgatttcctataaaccccaaacattccttttccatacgaacagatttttttcctataaaatcaacccatttcataacttttactattgtatcctctgatgttttttctcctggaactacctcaactaaaggaattaattgtggtggattccaaaaatgcgcaactgctattctctctggattttttgtatatttagctatatctgttggacttaatcctgacgtattagttgctaaaattacacttggtggacaaagctcatctaattgcttaaatatttcttgtttaagctctaaatcttctgccaacgattctattataaggtcaacatttttagtagcttcttcaatgcttttaactccttttattttatttaggatttctttatacccactatcttctaattttccttcagctttcaaaagatttaaactagcctttatactattaaaacctcgttctaaacttgcatctgacctaccatacataactacatttaacccagccttggcagaaaataatgctataccatgtcccatagttccggtacctaatactgctatattctttatatccatttttatcatcctttctctccatatatttaattttccatataataatgttagcataatcaaactttaaccttgcagatttcagactatagtctgatactattaactgataaaaatacgtataaaatccgcaagtatcaaataagttataagggctagatttaaacgtactttttacttttttcaattgttaaaataaagctaatccaacaccaaatattaaagcacctacaattaaggttgttacacaaaatcccataatatcacgaactttaagacctgctatagctaaagctggtagtgcccagaatggttgcgccatattcatccaagcctcaccatatgcaattgccatagctgctttccccatatctgcaccaagtgcttgtgcagccggcattataaacggtccttgtacaacccagtgtccaccaccagatggaacaaagaagttaatcaatcctgagcttaaaaatgcaagtactggaaatgtatgaacatttgatatactaacaaaaccgcttgtaatcatgccgcctaatcctgataaatccatcatgccttgtattccagcatagaatgggaactgcaccattattcctgctgttccttttgctccattaactacagcctgcatataagataaaggactgccatgaagaatgatacctgcaaagaacataatcatgtttacagcgtttacatccatagtaccattattcataaagtaacaaaccatatatgaaattccaagaataccaattaaccatgcaataactctgctgttttcaacacgtacagcaaatgtcttttcaattgctgtgtcagtactagttgcagcaattgcatctgcagccaataaagctgggtcaatctctacaacatcttcgtccttaggcatcatcattcttgtcattaaaggtaatataactatcaaagcaacagttataaagatattatatggagcgaaaatagtttgacttagtggaattaagcctatcgccttttccattggattccctttagttgctgccaaaagaggaactgaaccagataagcctccatgccaagtcataaagccaatataggcacttgcaatcaataaacgataatctgtacgtggtacttttttcgctacttcttttgcaagtaaagcaccaacaattaatccaaatccccagttaacaatattagcaactgctgctgcaaatgtaacaagcataatagcttgagctggtgttttaggtaaacttgcaatcttttctagaatacgtttaacaggcggtgaactagccaatgcactaccggtaaccaaaattagcgccatttgcattccaaatgctagaagattccaaaaactcttaccccaaaatccgatcatatcaattggagtatgaccggtaaatataatacctgaaacaaacataattaatgttaaaatcattgcaaaaacaagtggatctggaagaaatttttgaacaatagctgtaaaaaatttagataatccttttatcatttttttgcctccctatgtttaatatttaacaaacaagcttgctttgttactacaccttatttaataagcaaagcatatgccaaattcatatttctaagaattaaaaataacttttaaacaattaatatcgttaaaaaacaaattttgccttattaagatactttgacgattttatgttaagaaaattttttcaaaaattaaaacataaaaaagcgaaaaagttcacacttatatttatttccaaaaataagtgtgaactttttatacaatatctgtgcaaaactatgcacactttctatttaatgtttattcttcgaaaatacttaattactactggtcaagaataattttttgatcagtagtgcatttattttaatctttagtctccttacgaattaaacatttttctatctttctcataaatctacttcttatcaaataaaaataggcaaagtaaattacgatatatatgtacattgaaatttgatatctgtatttatcagcataaagtgaaattaaaacacctgcataaagaataatagctgaatataaatttaattttcctaaattacttaaatactcatcaacatttgtaatttcatatatcctttttgttttcgataattttttattaattatagcttctggttttttcagtatgtaaaatactccattaagagcatatattaaaaatattattgaacatatagctaaagtaaaaatataaaaattcatgactatctccttccatatatatattgtaattaattttctacattctatgtttaattgagcatttgacttgctagagtttcagtgcaaatttattatttcagcgtatatacagataaacaacttaggaattttatttattagatgaacatatttacaaggtttctaaaactttaagttcgtgtcttcactagaaatcataaatatatttgtgaagaaaacatttgaaaatgagctgttaaaggttcttagcttttcggaatcaaaatatttatgatttcggtaagttatcacataaatgcagttttaaatttaggtatctatatattataaaattcctaaataaaaaatatcgcaaattcatatgaataccgcgatatttcaatatctatattatttattattgttgcttaaaattatgcaaatctttcaataaattcatttaatctttttaaattagcatttatactttcgatagtagcacttatttcttcaatggctgctgcttgttcttcgctttctgatgctgattcatttacagctccaattatagtatttattgactgattcatattaataacaatatcatttattgttctagttgattctttactttggcttgcaagctttctgatttctgttgatacaacattaaatccttttccatgctcaccagctcttgcagattcaatagctgcatttaatcctagtaaatttgtttgatcagcgatactcttaataatttctatagcatctgatgttttctttgaagtttccataacatcttgagcctgctttagagtcttttgtccagttagagcaaaatttgaggccgaattagctaattcactaacacttgtagaaacttgatctaatgattctgatatttctgaaacactatttaccaatctagtagtatcatctaaatcaattccatcactaattgttccaataatcttcccttttgaatttctaataggtattgatataacttttatttctttgccagatacatttgtatcacctttttcaagtcttccacttcttaaagaatcttttataacatctaatggttcagaaccagctctaagttgcaactgaaatcctttaggatcttcatattcgatatatttttcagtatctgttaatccaaacgctgtatcatctcttgataaatcgttaagatatggcaaaacaatagaaaatgcccttaaaatttcctcgtccgttaaattctcagttaaatgctctttatatcccatgataatccccctcaaatatttatattcatctatattatatctttatagaattaacaattctacataagtagtcaaattcctttattattttgcaaatatcactctattttcattaatataattaaacaataaactataaataatattactttaatctcaaataaatctctaagttatctttgtaatttgaatgtaaataaattatagaattcattttctatttagttagttagtaacgcttataatatttttctaccaatcccaaattctgtaacattataccactgtgcctagcagaattttatataaacaaaaactacaatttcatttttttattatataacttaaaatactcacacaacaaaaataacgctttattaagaataagcgaataatattaaatcttgaatatctataaacttttcatcattaaatattctgtgtaatatgatccatcttttaatttaaaagagttgcttcttgtcccatactttttaaaaccaaattcttcatataagtttattgccttatagttatcacttgctacctctaattcaacttgttcaaatcctactctttttgcatattttaagatttcagttaacaaagcttttccaacaccaagattccaagcttctttaataactgctattccaaaatttgctctgtgtgaaactttaatcatatttccaatagtacatatgcttgaatttccaacaagtttatcatcaataaatgctgaaatcattacatccttattacttttgctaatgtcattgatgaatttttcttcatcttctatagtcatagtaatttcttctgtatacctaagcatatagtctgtttctgatgatgcctttcttaagtaatcaattaatttttctgcatcctttacatcaggacttcttaatatgcattcttctccatttttcaattttacttttttgtcttcaaatatcataattaacaactccactcattataacataagtctgcccaaactttatataacattttgaaaccttaccatattataacacaaatttaaaacatcacattaatttacaagaaaatctccttctcagattatgtatttcttatacttttaaaagttattcatagatttcactccaatataaattcctatagaataaaataatggtgaagaagtactacaagaaatttgtttaaaaacagattttattacagtattttttcaccaaaatatcactctattaaattttaaataaatactttcattatggaatctaagcttataaattttcttactttagattaacttttctggaatgaactttgaagaaattctctttattagagcataatcaagcattaatagaactcctcctgctacaatcattataaaactgctaagtaatagtactcctgtcatctgaccaattaatacaagaataactgggattacaagaagcccgcttatttgttgtgcttcttgaaaagtctctgactttgctgacaccataactgtaagtatcaacgatagcaaattaattgcaggtgaaagccaaagtataattatcagccattttatatctggaaagataagttttccaaagtatataaagccacctatattaaatattattccaattgctataaatgaaatcaaagtcacaatatacgatggaataaatacacctaaaattttagctctaagtaattgttccatagatattggagtataaagcaaggactctagagttttatgttccttttctcctacaaaactactagccccaataactgatgaacacattataggtattataagaaagtatgatggaaacatgaagtttatagccacttttactagtaattgagctggagtatatgttgtatattcataaggtaatttccttataagaggagccatttttgtaatggtgtttgaatcacttccaataaaatttgcacctataagtattccaaggggcactattattgtcaagataattggagcaatagtcataggaataattactcgttttgaacttactaactcatttatatctttatatataagtgctttttcattactcttcatattctaatcactcctgatttataaagacacatcatcagatgtaccttttatatatttgaaatacagttgttccaaagaccatttctgctgcattgcctcataaatttctccatcatctttcattatgctttgtattagagtatttacctcttggtctcctgaaataggtttgctatatatatcattaccttcatatacaaatccaaatttatcagaaatattctttcctctaatttttagttgaagttttgcatttttctttgaagcaagttcatcaaaggtgcctaccccaagaatatttccattgtttataaaaccatactgagtgcatatatcttcagcatattttaattgatgggtacaaagaaatattgtaacttcgttttcttctgcaagttcctttacaagctttgtaacatttaatgcgttttctggatctaaaccagatgttggttcatcaagaaataaaatttttggattatgaactaatgctatagctaatgaaaccctctttctcattcctgtactaaaagatttcaccttcttatcttttacctctagcagctctaacctttttagtatagaatcagtacgttcattaagtacattttcttcaacgccgtgcatttttccgaagaacattaagttttgttttgcagtgagattctcatagcaacttgaactttcagtcataactccacataatttatgaatttcaatattattttttaaaacaggaatccctaaaatttcagcatgaccagatgttgctgaaaggattccatttagaattctaactgttgtagtttttcctgaaccattaggtccaagaaagccaaatatctctccttttggtatgatcaaatttatatcattcaaagcattaatctttccatcataatacttgttaagattctctatatttattgcattcattttattcatccaactttctcttcagttttttaacaagaaatttgtacttttcatcttctcttaatgatacaaatgccggattttcagtaattgcagcggcaaaatttttctttattgttgtctcatctacaggagtgctcgttccaatatagctattatcctcaaaccatttatcaaccttagtaaaatattcatttcctttaaatttcaatggaaactttattttgcagacaatatttacatactgctccagagcacatatggccttttccttatctttgtgcattaaataaccttgtgctgcaacaatatgaattcctaaaacatcatttgtcaaaatctcattaagattaaaagactcaataatctgaataccttgagaataaatcttttcaaacaaaacttgctccataatatttattgaaagatagttgtttaaaagtcttaacatgtttattacattattaaatactagtatttgattgacctcatttgctttatctatttctccctgcatcttgtatgcattaattagcattacatcctcaccactatacggtattaatttattatccaataatcgaataacttcttcactatttcctaataacatttgtgccaatgcttccattgtatttgaactctttatttctgtaatattatccgactcttcttttattctcttacttaataatatacatttctgaaaaatttctctttttatatcctcagtttttgctaatatagagtaatttattaataattgatccattgaaagcaaaaaaggaaaacaagaatagtatttttttattaacttttcacatctatttgtgacttcatcaaatggttttatagcaaattcatgtgaaagttcattgtaaattttcttaatatcttcttttttaagctgaggggaatatcctaataattcatcaaccgaaatattaaaataagttgcaagctcaggaagaagtaagatatcaggataacttaatccagattcccatttagaaacagatgctttagaaactccaatataatctgctaattgctcctgagttactcccttctctttcctcttataagcaatacattctcctatatttaacttcttcatattcctcacctctaataatattttatgtgtttctacattttcagtaaatggattcctagttgatattagtagaaaaagttaacctacaagaaacttaattactaattttaaacttcacattttggggaataaaaatactcccattaaaataacagatttttattttttatctgtctaccttaaagggagcatatcatcttctttgaataatacgatttttcagaattatatttaatttcaataattcaccgttttagcctttgagtccatttgcttgtcgctccatattctctatgacaacatcatatatctcccctaaagaagcacaatactcaagtacttgccatggagtatttgtatggaaatgaatcttaatcaattcatcatctccaactgcaagcagagaatctccctcaatgttttttgttatatattcatttatttcatcttctgaaagattttttccttcaattaataattgcgtatcaaatttatattcaagcatatttttttctcctcttcctctttaaataaataatcttaaaaatataataaactttaaagcagatatttcttataatatccttaatttataatattattaatgatcttaattggataagaacttattgctttatctgagcatactttttaattattgccaatcttcttagtctaaaattcataatccaaaaaattaatacggtaatgaacgggagaactaatttaattgagtctaacttaggaacttgcgtaagacatgctccaattattatgataattgaatttattatactcgtttttaattgcaaatcgaaatatttatcatctaaaacaacaaaatttaattcattaatcgcatatataacttttcttttcttagaacataataaactataaataaaaaaacctatgcccataatactaaatactataaattccttcataattatcctcctatttatattaatattgttcaccttaaagtggcttttttcttcaactattaagtgtctcttctaaaattatccatttataatcccttaatttctttttcgaaattatctctatcttcttggctttcaaataagttgaaccaatcacatatctctattgcaaagtcaataaaagctgttccctgatcagttattacatttttatctctcacgactctttcagaaataaaattttctcttggaaatgggtcattttctccatatatatcaatatgtttttgtgtccattgattaataggcgtagtatacttaacattatttaaaattcccgactttgctaaaaaaacggttcctgctccacatatacctcctactagtttcccatctaaatatattttatcgataagctctattaattccggtcttacttcaccataccatcctccagtaataattaatccatctacattataatttaagacatctttaactaatttggctggtttatataagaaaccagatcgtcctttaatcattttatcttcataggagatagtaattatttctttacctgcctctgaacttagtaaatgactgataaatgtaacttcatagtctgtcatttcatcaaaaattaaaaataatattttgcccatataatcccctttcctctgctcctgttcatgaactttcgtataatcttataagttagaagtatgtattttaaaccaagtacttcttgcattgacatagtctaccacttttgcctcacataaattttcgtgatatataatctacatattaacttatgtattgtcactttcaatttgattcttacattaccattcttatcttaacctttggcttaccagaattttaaatataaatttattacgtcaatatatattacgaatcacattcctctttaaaaaaatatctcttggacggaaatgcaattatgagtcctaacagtgattctataatatttggagtattatatggattgcttgttttcatggctataaagaacatagatactgctaaaaaaaatacattataaattatgatttctaagtatgcccatttcttaagcttaaaatatccataggctattgttaataggactatagcgcttaatactctaagcgcaccatctaaaaaattatacataggaatgggataaactccaatcttctccataatgcttttcataggtgaaattgatattataattaaggttgcataaatcaaactcatatctccaataaatgtcactatcataggtcgttttcttttcatgtgcactcactccctctaaattttacaataaaattacattataaataaattataacatatattgtaaatgtagttttattattcgcatatttatagataacccaactaaaacctgaacttataattggcttatctatataagttccatattgataacaatacatatctactgtttcaatttcatgaataccagtgatattgaaattttataagtttgaatatcattgtggaaccctatatatcaaatacaatctcaaaattatacaaaaagatcccaacttcacaatatgaatttgagatcttctatcttaacttcttgaatatttttaagattgcttataatgcgagtatatcttctataaataccaattataagctatgtatatttatatcgatacccaaattaataattagatttatagcatgcagtttattggttaagttgattaaataacaagttgctgatttgttcatccatagtgaaatgacaacatgaaaaccctatctctttatatcttttagccctactccactaacccctgctttaaaacttctcataaataaatcgaaagtacctttaattaattgtgcattctcaaactcagaatttaacttaagtacttcaattgccgcttcgatagtacagagctctccttctgaagcacctttcctcaatgtatattctgatttattaattggatttaatgaaattcttggaagcttctttaagtagtcgctctttcttagtatcttctctgcttctttccatgttccatctaagataataaatgctggaattttttctgaatctttgcatttagactttctttctacaggctcatcatcatccataggaaataatatatgtatttcataatcatcgctattaatatattcaattaatttttcaggagtctttactctctcccaaagaattaactcagttgattctggattcaccaatttcaataatctagcggtatttgaaggcctactaaattctctttctgttgataatatcaatatctttgcttttgtctttattttaggcacaatatcgcagatacaatttattattggcaacccgcatttattgcaactttcatataacttagtaatttgcttaactttaaattcagactccattttacctccattattaattagttagtatgtcatatcttcttgctattactaactgattataacatatgtattcaatatatcacttcctgcttttcaaaacactggcatatgaattaccaattaatttctggatttatgtcaatatcttattaataaaaggtcgaactttttaaaatgcttgtttgaattattgattatatttattaaaatttacgcatttaatatataattataaggaatattatcaataatatttattttatattacaatattacagtctttattcgaaatttcactcaaatactaaacaaactctactcacaaacaatatataacaataattccaaaataatacgataatttatctgtaacggccatataaaaaaaatatcatatagtcttgtcatttgataacgttttgtcttccttatatttacttttttggtttaatgggttgattctgtaaattttagtgataacatatatttgaagacattaaaaatttaatatttcatataaaatttttaatgtctattaatttttaaatcataaggaggaatagttcatgaataaagacacactaatacctacaactaaagatttaaaagtaaaaacaaatggtgaaaacattaatttaaagaactacaaggataattcttcatgtttcggagtattcgaaaatgttgaaaatgctataagcagcgctgtacacgcacaaaagatattatcccttcattatacaaaagagcaaagagaaaaaatcataactgagataagaaaggccgcattacaaaataaagaggtcttggctacaatgattctagaagaaacacatatgggaagatatgaggataaaatattaaaacatgaattggtagctaaatatactcctggtacagaagatttaactactactgcttggtcaggtgataatggtcttacagttgtagaaatgtctccatatggtgttataggtgcaataactccttctacgaatccaactgaaactgtaatatgtaatagcataggcatgatagctgctggaaatgctgtagtatttaacggacacccatgcgctaaaaaatgtgttgcctttgctgttgaaatgataaataaggcaattatttcatgtggcggtcctgaaaatctagtaacaactataaaaaatccaactatggagtctctagatgcaattattaagcatccttcaataaaacttctttgcggaactgggggtccaggaatggtaaaaaccctcttaaattctggtaagaaagctataggtgctggtgctggaaatccaccagttattgtagatgatactgctgatatagaaaaggctggtaggagcatcattgaaggctgttcttttgataataatttaccttgtattgcagaaaaagaagtatttgtttttgagaatgttgcagatgatttaatatctaacatgctaaaaaataatgctgtaattataaatgaagatcaagtatcaaaattaatagatttagtattacaaaaaaataatgaaactcaagaatactttataaacaaaaaatgggtaggaaaagatgcaaaattattcttagatgaaatagatgttgagtctccttcaaatgttaaatgcataatctgcgaagtaaatgcaaatcatccatttgttatgacagaactcatgatgccaatattgccaattgtaagagttaaagatatagatgaagctattaaatatgcaaagatagcagaacaaaatagaaaacatagtgcctatatttattctaaaaatatagacaacctaaatagatttgaaagagaaatagatactactatttttgtaaagaatgctaaatcttttgctggtgttggttatgaagcagaaggatttacaactttcactattgctggatctactggtgagggaataacctctgcaaggaattttacaagacaaagaagatgtgtacttgccggctaatttcttgctaaatttatacatttattcacataactttaatatgcaatattcccacaaaatattaaaaactatttagaagggagatattaaaatgaataaattagtaaaattaacagatttaaagcgcattttcaaagatggcatgacaattatggttgggggttttttagattgtggaactcctgaaaatattatagatatgctagttgatttaaatataaaaaatctgactattataagcaatgatacagcttttcctaataaaggaataggaaaacttattgtaaatggtcaagtttctaaagtaattgcttcacatattggaactaatcctgaaactggaaaaaaaatgagctctggagaacttaaagttgagctttccccacaaggaacactgattgaaagaattcgtgcagctggatctggactcggaggtgtattaactccaactggacttggaactatcgttgaagaaggtaagaaaaaagttactatcgatggcaaagaatatctattagaacttcctttatctgctgatgtttcattaataaaaggtagcattgtagatgaatttggaaataccttctatagggctgctactaaaaatttcaatccatatatggcaatggctgcaaaaacagttatagttgaagcagaaaatttagttaaatgtgaagatttaaaaagagatgccataatgactcctggcgtattagtagattatatcgttaaggaggcggcttaattgattgtagataaagttttagcaaaagagataattgccaaaagagttgcaaaagaactaaaaaaagaccaactcgtaaaccttggaataggacttccaactttagtagcaaattatgtaccaaaagaaatgaacattacttttgaatcagaaaatggcatggttggtatggcacaaatggcatcatcaggtgaaaatgacccagatataataaatgctggcggggaatatgtaacattattacctcaaggttcattttttgatagttcaatgtctttcgcactaatacgaggaggacatgttgatgttgctgttcttggtgctctagaagttgatgaaaaaggtaatttagctaactggattgttccaaataaaattgtcccaggtatgggtggcgctatggatttagcaataggcgcaaaaaaaataatagtggcaatgcaacatacaggaaaaagtaaacctaaaatcgttaaaaaatgtactctcccacttactgctaaggctcaagtggatttaattgtcacagaactttgtgtaattgatgtaacaaatgacggcttacttttaaaagaaattcataaagatacaactattgatgaaattaaatttttaacagatgcagatttaattattccagataacttaaagattatggatatatgaatcattctattttaaatatataactttaaaaatcttatgtattaaaaactaagaaaagaggttgattgttttatgttagaaagtgaagtatctaaacaaattacaactccacttgctgctccagcgtttcctagaggaccatataggtttcacaatagagaatatctaaacattatttatcgaactgatttagatgctcttcgaaaaatagtaccagagccacttgaattagatagagcatatgttagatttgaaatgatggctatgcctgatacaaccggactaggctcatatacagaatgtggtcaagctattccagtaaaatataatggtgttaagggtgactacttgcatatgatgtatctagataatgaacctgctattgctgttggaagagaaagtagcgcttatccaaaaaagcttggctatccaaagctatttgttgattcagatactttagttgggacacttaaatatggtacattaccagtagctactgcaacaatgggatataagcacgagcctctagatcttaaagaagcctatgctcaaattgcaagacccaattttatgctaaaaatcattcaaggttacgatggtaagccaagaatttgtgaactaatatgtgcagaaaatactgatataactattcacggtgcttggactggaagtgcacgtctacaattatttagccatgcactagctcctcttgctgatttacctgtattagagattgtatcagcatctcatatcctcacagatttaactcttggaacacctaaggttgtacatgattatctttcagtaaaataaaagcaatatagaataaccactacaaaagtagtggttattctatattttaaatcaaactgtaaaacttaagttttatagtacctaataatattttactaccagcattagattagttaaaatacaaagtttgtggtaaaagtattttagattgcataatagccttctatacttttaacaatataaccaattgctcaccatctgcttagaatatgcttctttaagctctaaaatacatataaaaaagtaggaatttcttattaaaattcctacttatattatatataaatttaatcgttaggttttattcgcattgttcctctttaatttatctcttataacattttattataattgttcatataattaattcaatatactattatatattttcaagcattaataattattcagcatctgtcattacatatgcttccatactttgacttcttattaaatcatagctaatccatccatagccattgattccccagtctttaccccatgaatttattatttttacagcttttttactatcatcataaccaactacgcacactgcatgaccacctctattttctccatcaatctggtcataaattggattatcagaatttaaattatcaaaatctggatatactgatattccaataactactggatttccagctgctatttgtgcctttattgcattatagtcaccatctggaagttgactccaactttttgctttatatttggctgcattagccttttgttcatctgtaggtgtaacctcccaactatattcactaccatcataaggcatatcagataatgtagtacaaccttgttcttctaataatttaaatgcatcagaaaaaagagctccccctccatctgctgaatcatcttgatgtatctgattatatatatatgctggactaaatacatgatcatttgtacctagtccccacttccattcaaggccttcttgataagtcttatccgcgtatcctgttgcccatgcaacacagctccctaagtctccttgattagatactttaggaaatttacttgataaatcaacttttgcaggtagttgtattttactatctgaattttctaccattttaatacctggtatactttcatgtagctcttttaatcctgtcggatgcagtgtttttgcataggaattttgagttggaattaaagctcccataactataagtgaacatgctaaaactttgatactaattttttttaatttcattttattactccccattttcattatagaatttaaatctccccccaacgattttattttatatattcttaatagttatctttataatcgcttcatttttttatcttagtccttatattaaatttattaagattcaatcagcaatttgtgaatacaaaaaaagacaatggtatcgtgatttttttttcagactccattgcccttgatattctatttataaaaaatactatcaattataataaaatatttttattgattaacgcttaaataaccattaagttatctacaaatactatcttcacataatacacaacgtaagtaaatacccttttctctaaacgcataaaatatatcattaaaggcatattaaaacgtttatttctttttatttctatgatgatattttttaagatacctatctccactcatttaacttttaaggaaatttataattatttttatatcgtatattgcaataaatttacatttgaaattctgttaatttatgttcttaattaatattttcgaaatttaaaaggccgccaacaaaattaaaacttgtatcctaatctcataaatcattaaaataaaatataaataaaaacggcagtatctgcaaaagtactgtcgtttttcttatatcttatttacctaggcattaataataaaaaactagagcaatttaaaattaacctatctccccttcttgaagcaacttagtgtataaatatccaaaagatacattaacatacacatttacaaaaatcattccaaaagacataaatacatcaaaatattcgggatgccaatattttatagctactgatggagctattactaataagctccatcctataaaacttatatataaccaaaatatttctgaaatgtgtccatctgtcatcttaatacttctatcaattgcttcttgaatgcttatattaggattttcagcccatatatagtatgtcatagaatattttgcagctgctattatacctgggattattaataataatgaccataatagtgtaagaatatttactgctaacgtcattcctaatgctttaaagaacttctttgtgccagtaaatatatctgaaaaactaactttctcgcctctaactatgtttaatattatactaaaatatccaaatgtaaataatgcaccaaatataatctctaatatcaaattccatataacactagaatcttgaaataagcctcctataatacctgcaccactgtacactagtgtacttaatattccaatcttccaattgcctttcaaactgtatcttgcactttttcttatttctttgctctcaatatccatatatctccctctaaacttctctcaaattaataataaactagacctgttagcaatctccataaaatatttttctactaacctgctattgattgagttcaaatttaattatttatagtgctactaatactagtacatattctgaaactttgtataaaatatcatattcccaattttacccaatgtgatataaatttacaatccaattgcacttttgtaaatacaagactgtaagtttttagaatcacgtccttttcaaaatgtaatttccaattttaaaaccataattactgtagaaaggtaacgcttcatcatttgcatataccacattaatttgaatatctgttatagcgttagattcaaaccaacttaaagcatttttcataagcttgtctcctaatttaaactttctatactttttatcaataaatatcgattctatttcccctaagttattttcaattgaacttaaacaataccctacataattttctgtttcattgtctagaagcatatcaaacttaataacaccgtttttagcctttttgcaaatagattctattcttttgtcaaaagtaaatctgtcatatttctccttaaagtgtacagatttattataatgaatagaattaagttgttcccataatggtttcattaactcaatttcctttattcccttttcaacaatagaaatattcataaaccctcccactactcaattaacatttaatacaaactaacttgctatataaacaaattataacagtattgtaaatagtggtaaatccattctctaattaattaatgataatttaagattatttttcttcattatgtaaaagtcttattaaattatctttatgtttatatatcattaaaacacatgctattaaactacttactattattgaaacaggtgctctcataattatacacattaaaggtattgttacccctattgcaattgaccttatagaaactatacttgtaaataaacgcaatataaaatgaactgcaactccaaccaatgttggaattggtacaattacaaagaatgcaccaatagttgtattaactcccttcccaccattaaatcctagaaatggagtaaaatcgtgtcccaaaattaccgctatagcaataatcgaaagataagtatccattgacatttgtagttcaaaaatctttgctaaacaaattcctaaagctacaggaattataccttttgaaatatccactatttgagtaataatggatattttacgtcctactactctattaacatttgtagatcctatattcccactacctttggtccttatatcaattccatgcaactttttgataattaagtatcctgtaggaattgaaccacataaaaaagatactataattgataaaataataatcatatattctccctaactttgttctatttttttaatttataatagtgagatgctctaaaattagaacaatcctccattatatttcttttgtgctctaaacatcatcctaaatcccaatacagcaaatattacaaaacatatccatccatattttgtgtttcctattaaattaataatgcctgtcagtataattccagttcccatgataatgcatccttttccaacttcctcagtataaggtttcttatcactttcagcaacccttgtataatgataatcgtgaatcaatgctatctgctcttttttccaaataagccatcctaaaaatatagaaattagtcctaatgggatcattaatatcaagttaatcacgtactcatctcccaatgaaactatcatcttttatatttatcaaatgctttttctggattaaaatgaatatttttaaaaaggtatatgagccaaactaaaaaagtaatccaaaagcataatttaccccaaaatattgatgctattgcaccaataagatatataattgaacatgtaaagcagaaattacgttcatctttacttaaacgaactttatcgtatttctctcgttctttcttagtttttaaattatatcccgatatcagaatacatgctttatctttaaaaatcataaataccattccaagtaatccaaaaatagctgacataataaagccaataatcatcattttccatctcctcaagtaaaaatagaaaatatttagtttctatttgaattttattgcaattaattctaacataaatagtaaatatcacattacccatttactagtttgaataatgtgatatttaaaattcttattcatttattaagagttatattaatctataaagcaaactttactcaacaaattccttaaaaccttcagaatactttgttggttggaattctattacatcataattagcaactccatttttataaaatggatcttcactaataatcccatttacctcttctttattttttgcaatgcataaaattattccaccatctctaggattttttctccctgaacagataaagttgttgctagcatagtatttatttaagaatgtaatatgatcttccaaatgcttttcaacctcttctagtggtttaacataagttaaatttactataaacattttctttcccccaagtctaaattacaatttgttttataaattataacatacttgtaaatatcgcactattaacttttcaaattacattatttaaacttctacctgcacattttgttttattattgcaaaaaaatataataaactctacaaattagaaattgccttgctcaactgacaagttaattatgtcttcttctgtaatcttccgtaatactctgcaaggattacctactgcaattacccctgctggaatatctttatttactacacttcctgccccaataatgctaccttttcctatagtaactccaccgcatacagttgaattagcaccaatccatacatcatcttctattctaataggttttgatgtcccaatcccttctgccctttgtgttggaaatatagcatgtcccgaacaagccaaacaaactccaggagctataaatgcatttgcaccaatgtaaactggcgatgtatccaatattacacaattatagttaatcacagcaagtccatgggtatgtatattaaaaccataatcgcaacgaaatgacggctcaataaatgttagcggatggcaagttccaagcaattcttttaaaatattacttctcttttctttttcagatggtccagtctgatcatattcccagcataattctttcgcttttagttgtaattctgatggcatatctgtgtgctttgagcaatatcctctattttgtttcataatttctttaaaatccattatcttagttcctttcaaattatgatttgtcttttatttaattgtagcatattttataaattccgaactattcagttctaaaatcatataaaaatggtagatagtaaattcatatagcttactttccttgaagcctaaattgcaatttatctaacaaatcaccaattaatcaacaaataaattccattcttataaattcgccgtacccaataagggtatctttttcatatatttcctttactataaatcctgctcttttatagcatttaattgcccgctcgttaaaagatcgcacctctaaagcaattattttgcttggatataaattagcacattgctgttttactatctccattaatgtgtctcctaatctttgtccacatagagatggttttaagccaactccaacaataatacattcatttttctcttgtagtcttatatatccacataacttatattcctcatcaattacagcaaaaaattcctttttccttttttcttctattgttatagcccatttattatcaagtactttagtccacgaaggataattatatatagaatattccccatcatatttccaattacaaatttcttttgcatataattttgtaaattcttccaatatcaatctcatttcatatcccccctgcccatttgtcatatctacacaatgcgaatcaaaatgacttctaaattatgctgataattaatattatagtttccatatacatttactttaatctactaatcatttcatggattgagtcatcaactttagtacataagccattagtatttgaaccgataaaatatccattttcacattcataataattaataatatactgtagagctggaaaatccttaggtgttaacaacagagaataggttgttactttatcgcttgttacccccatgtcagaatttccatctgaagaagcaattttataagcgtaagagactatctcttcattttcaatggttgtatctattactttttgtagaccatcttctatagtatagttatattttgttaactgaaatttgtttaaaaaattgaaatacctataatcaagattggtataaatattttttgaaagatagaaactcacatcacaattagcatagtcataatatatccaatcctttacatcaagtccactaattgagtagaccttactacaattaatatttgctatattagtagaatactcacttttaagcctgctattactatcaaaataactttgatttacttgaaagtttcttatcgctgaatattgctgcttattaaattcaacaattttcttatctttattttcatttctataaacgataaaaaaaatagaaatagataagataaaagttaatattgttaagaaaataaacttaatcctcatattttcacccccccccttttaaacaagcagtaaataattttaatttaacaatactttcctatattgaatcaattataatattattggtaatatcgtattattcagttttaaaaaaacatattttgtatcaattgctgcatccaatctacacatcaaatacaaaaaatgccccattctttcattcaactaatgcgacatctaaatctaatgaatattttgtttttattaacctagtaatactataaagtaatatttctttgaatcacttcttctacttctgccttaacttcttcatttattgtaagttcaagacttgaattacttttaaaaaaagttttaactttaaattcaattatatttggtgttgtccaattataacacttgaccttaggccacttataaaaatcccctgatatatatattccattttctcttattcctgaactctttaatgcttttattatattagagattgaaaattctatccaaaatatattactaaaaacactctcaataatattattattttcatatctaacataaagttttgcatctttccacgataacatacaccaaactattaataatcccccccaaagaatagctaatcctattcctttatttacttttacaatatttctaccgtgagtatatgatgtatataaatcttttaataacatccatgttccaattataaatagtaatatgctaagaattgaaaatccataaaacttactcaagtgatacaccccatcgcttaaaattaaacattattaatctattataacatatattgtaaatattgcattattataaatttcttatcaaaacatatggtataattttgtaaaagtgtatttaggagaagagctatgtcaaatattaaagtaatttttatagttcttttgaatgtatttattatttcactagatttactagcagattacaataagagtagatattttatcttcatatttccgtttcttggagcactcaattataaatatgtatttttaaattccaaattaactaatcattagagatcctttgctcaattctctattataggttttgttatattggctattctttacagttcttatttcatgtaattttagtatttcatagaaaaaaatcgcaaatttaattatttgaacagctccccttcaagtaacagattttatcttcttatctgtctaccttaaatggagcatatcaattttaaataatacgattttttaattttctatttatttttagttatttatagcttataaaaaatatgacagaactggatttaaaactataatgcatcaaacttggaatctgataaacttcaaatcatgctcttttgcatgactattttttcttaacaggaatccagatttcgctgtagtaattctcatcttgattacccttaggataatcagctatatcagtgtacatttcaatattataacctgctgcaatttcataatccttgcaattaggcagccattctgagaagatttttctattcatatcctgcaacgattttggcattgcgcccttgcaagcaaaaacagcccatgtgtgtttaggaataatctttgtaacaaaaccattaggtatttcaatggatggattataattatctgcaatcaaatattcaaactcatctgatcccatgctctcatctatggatattccatacattccacacacaaattttcccttcccagcttcataatgctctgtccaaaacggtggaatttctgcaaatgcattctcatacttaaacacctttgatacgcccatgaccgtaaacgaatctttttcaacaattttgtaatccataatataaccgccttccaataaaaacttgattttcagcggagcaaatgacttaatcatcgctccatcttttctaacagcagtaggtgtaacaccatgaaatcgagtaaaagcttttgtgaaactatctggtgatgcatatccatattttaatgcaatatcaataattttttcatcagtagaaacgaggtcactgccagcaagagtaagcctgcgttgtctgatatactctccaaccgtaaacccacaaagcattgcaaagcctttctggaaatagaatggagacataaatgttttttctgcaatattttttattgtgatttcttcagtgatattctcctcaatatagcttatagcttcaccaattccttcaatccatttcataattatccccctgtctgtacatatatcttatctcttttcaaacggttattcccgactttttgtgttatgttttgtctttccaaaaagactatcattagcttccccattactcatcactaaaagtctccatacctgacaatggaaatattaatgtaactttagttcccttgttaacctcagaggtaattgaaatttttagtcccagctttaagcagagcttttcacataaatacaaacccatgcctgtacttttgctaaatcttcttccattctcaccagtgaagcctttttcaaagactctatctatatctttctctattatccctactccattatcttctataaataacattactgaattggcttttttcattgatgatatattaatttgaggatctttattacttgaatattttattgaatttactattatctgattaatgataaattcagcccatttcccatcgctatatacattttcttcaatgtcatttatattgatttttattttcttatgaatgaaatctctatagtttctttttactacattttttactatattacctaaactaatttgttttataatataatctttataagcattattacttctagaatagtacagtgcctgttccacaaatctttcaattttgtctatctgaaagtctattttattagttacttcattttgattattctcaataataagctttgaagaagctattggtgttttaatttcatgaatccaggcttctaaatattctctataatcttcctgcatatctttataatattttacatgctcatacatatctctacttaattgtttaagtagagagttaaacttttctccttgtgcagattctgcttcctttagcatatctggaattaaatatttcttgtccaatttttctaataaactgtcaatctccccaaaatactttttatgctttatatattctaaagccatgtaagatcctaacgggaaaaaccatatacaaaaaacaaatataactataattaagttaacatttataacaagcattattattgacaatataataaacatgaggctattacataatattacaatagctttatctttaagaaattcacctatagtcatggcataatataccccattcctcttcttgtttctattggattttctattcctatttcttcaagcttctttcttaatctatttatattaacatttaaagtgctatcgtctacaaaaaaatctgctttccaaaggtactccataagagaatctctttttactatatttcctttattatttattaaaaatgatagtattttaacttcatttttagttaactctaaagagttatctttataaataattgttgcatttgaaagatttaaattaaaatctctgtagcttaatatattactattctttatgtttccataagtcctttttaaactattagttattcttgcaagtagtatttctgtattataaggttttgtaataaagtcatctgcccctaaattcatgctcatcagttcatctacttcactatctctacttgtaactattataattggaacctctgaagtcttgcgtatttccctacatatatagtaaccatcatacataggcagattaatatctagcaatataagttcagcgttctcactttcaatataatttattatgttatccatatctaaaggagccttcacttcatatccatatctctctaaaaaactttgcaattcctcccttataacttcatcatcttcaataataataattttcctcatcatatccccctactacaaatataaggttattaaattttgaaatccaaaacttaataaccttaataattattataaaactaaatactacattttaccacaattttactcaatatcattataatgacttcactttttctttgtagttgcagataaaattatcattaagagtccacttaatccaaatatcaatttcccaattactacacctataggtattgagaatgctggctctaccgcactaagagacatggggtattgtacaaagaaatttcctccaaataaatcaacttcatatggtagcggaacataatttataagcaatactactaccattaatccaaaaattaatccttgatgatatcgtcctccaagacttcctacaccaaacacaaacagcattgatggaacaagcgttataaatgctggcagaacaagaccgccaaagcttaagaagtgaaaatttacactataaaaccacacactgtataaaattggtatcatagaaatcaaaacaaatcctataataatagtaccaaagcgtagcatctgaaatttaaattgatcaataggagttgccctcgtcaaatcttgtacatttttttcttgttttgaataaagaaatgagataaaaaataataaagtaacaagtaaaattggcagcactttagcaaggtattctccataactccagcctgaaagcggcgcagtgtttgccactccaaggataatatcacttgtcataatttcgtagctatatatagctgaaattataagcagtcctaagaaaaatttatttataataagtctttctagttcatattttaataatttaatcaacatttaaatcctcctctttaagattacatgcatctagaaaatcctgccatgaaattctttttgtttctgtcttagcatatagcttagataaaatttcatctattttattttcgccaccaactaattcactggctttcagaatttgaagaggcatttttgaatattgatttacagctctattatcaacaactgcctcagcatatttttctggcaatacatctaaatattctgggtgtctaatataaaaattatcactcttctccttaatatgtttcttccactgatctacatagtttttttgtgcatattcttcaccatacttgtcctttgcaattcgataggttgtatatactgcaagtccttcacctgaacctccacattttacgccaaaccactgatgactaatttcatgggccagtatttctgcactttctgttccctttaatttatcagctaaatttttatcactaaaacaagtttcatccataatacttatatttgggtatgctagtccaccgccataaaatacagttccttgtagtatttttagtggattattttcagacacattatataacttaccataatgaccagcgcaatatttaatcgtatccttcataactttttcagcatccatcttctgcatcttttcttcaattgtgctgctatagtataattgtacaggcatatcctgatttcctaactccttcacgacataattacctgctattaaatctactccattacctctagccttcacaagccaagttttattatttttattttcagaaagtaattttacaatggcccccactggatttgctataagtttgccactttcatcctttttcttactatctacaactggcataagtccagcagacatggtaaccttacctgtaatttcaccgttatcctcatttctctttactcttattattggaataagctgatagctttttaaatcaacatatttatcactaatactagtttcataagcaaagtcactaaactcttggttaattttagggacaccttgatattctacctcaagctttatttcttgttcagcaggcactttaaatataatgctgcctctataatcatttaaaaactcaaatttaacctcttttccatttgcaacaacatgttgaaaagtatacccattcatcatggtgagcctgcattcctgttcacttccactcaaattttcaagagaataagcagcctttcctgaaagacttcctttactttcatcaaaggatacttcaaaatcagtatttgataactgaagtttttcatttatttcatctgatgcatcctctccatattctttataaacaaatggttgatttaaataagcatagcagctgccgctgattaacataatagccaatataggaatataaactttccttgaattataaaatattgattcaaataaacctttgccataacgacggacacataagactcctataatccaaaagcttccaaatgctaaaaaccaaaacaaacgattttgcttcatcaaacgaaataccacttcattgccaaaataatctgaaagtgatataacgcttggctccatccaatggagaatattattatctcccaataattcaagaatatttttcgattcaaacaatctccaaatacctagcaccgaaaatataaaaaataaaatcatactgatatccatacgacagaaaatttgataaagtgcagaaactaatacaattgataataaaactgaaggtaacatcaaaagaaagaagctattacaatacgtataagcatcaaaaatattcccaagtttgttgaatgtatacggaaaataaaatactgctgtaataaaaacagtaacaatagctgttattcctaaggcaagtaatctgactatatttgaggttaatggtgagacaatgctattggttaattcttcagtcttgtatttttttattctgtcaaattctagtaaagttaacattgcaaataatattccaccacctattgctcctgccatcactggatttgcaatcaaatcaccagataaagttggggcacctgctggtttatacaatttatatcctgctagtggacatatcatagttaataccataattagataaacaatctttgagtgaaaaatacgacttaattccactcttaaataggaaatgaatttcatgattacatcgcctcttttcccatgataagatacatatatgcatcctcaagggtaggctctacagtctctgcaaatgctggaagtgtttcccctacaatacggcagataataccatgtgctgtattaactcttgctgttaccttatattctcccttggaactttcccctagtctttcttcaaagactccaacatgatggtgtgccaaggtaattaattcttctggagttccagtaaacaaaatttgcccatgattaataacaatcagtttatcacacaccgattgtacatcttcaattatatgagtagataataagactatcttatcctgtgccattttggaaaatagatttcgaaagttaattcgttcttcaggatctagtccaacagttggttcatcaaaaattaataatttcggatttcccagaagagcttgtgcaattcctacacgctgcctttgacctcctgataaagtagaaatacgtgctttacgtttctctttaagatttgttttctcaatgacttcttcaataatcttcttactatttttaattcctttaagggccgccatgtaatctagaaactgccagactgtaagttcatcataaagcccaaaagcttgtggtagatatcctaggcttccttttaactttttttcatccttaagtattggtatatcatccataataatttcaccactagtttgtattaggcctcctacaagcaatttcataagagttgattttcctgctccatttggtcctagaagtccaataaggcttggacttcctatttcaagtgaaacctcctttaaagctcttttaccacctttataatccatatttaaatttttaattgagattttcatattctccttatcctttcttctttcttttttaaatattattttttactatatctctatagcttgtatacgttatataaaaataagctatataaactacaacaaatatcaaagctgtaattaatgttgaaaatctaatattcatttgaccataagagttaatttctttattaactaccgtaatcccaacaatggaatggattaatgctaggatcataggaaggctgaaatatatcacggtttgaataaagattgttttatctatcatgttcttatttaccccaatcctttttaatgctctatacctttccatactatcactagcttctgatagctgcttaagagacaatatagccatgctggttattaacaataccgcacctaaatataagcgaataaacaatgctcctgttgatgatctctttgccatagaataaatatcatccttagaataagcatctatgattggaagatttaaactttcgtactctccagatctataatatttctggatcttatcgtactttttattgttttcttctctgttttcatctgtatacattatattaagtactgatttagaaactttatagcctgatagaaactcatcatttatgactattgtgcactcattatttgtaacattaaaatcttcaagatttcctcgtataacttcctgatttttaacattaaattcttcacctttaatcttaactttattactactttttaactttgcattaattggtccaactaatttatttaagtttgataaaatcaatacctcatccttatttaaatttatttctttctctccttttaattttaatatttcattatactcagatatttttacaaaacttccaccaaacacctcaaattctttatcttcagttccaaataaatctctcaaatctatgactggaacatattcattgtaaattgcatatttttcatttccatcttttttaaaattaattttattaagcgcatcttctacattattaacttcatcattggtatataaaatcacactagcatcaaaaggtgctagttttacaaatcctgcttcataccctttcttaagaccgattcctgtagttaatgcaagtattgtaataaataacattaaacatattaccgacattgatataaaatttgtattaattttgctatatatttgttttactataaatatatttaatcccttaaaatatgcttttttattattacttattatatataatatgattccagataaactaaagaagaatagtactgtgcctactattagaaagactaatgctggtatgataatagaatcccacaaatataaattcatccctaaaaaagttttatatgtaaatgttagtgatgccacacttaatataaatgatgttaaatatataaatagatttttaaatttcatattttcatttcttttatctgctgccaataaatcaattattttgtatttagaaatgacaaatatattaaatataattacaagtaaaaacattattccaaaacataatatagtcttacctatagcatttattgaaactataaatctatatccatccattgaatcatcaaacaactttaatataaaagtagataaaacttgtgatgttactattcccaatataagaccggcaattaaagatattcctcctaccataaaggtttctgtcactaaaattctagatatttttctttttcccatgcctaaagtcatatatatacctaattcttttttacgtttctttattaaaaaattatttgcatataatattaaactgcctaatacaactgatacaaacattgatatagcagatattgtctcaattaacttatccatataatttgcagtcgatgattccatatcaaaaagtgccttttgtgaatctattgaattaaaactataaaatatgcagacagctaatattaatgttaagaaatatatagtataatccttataacttttttttatattgtcataagctagcttaaaatacatcattatcaccacctccaacaaggcatatcacttctatgattttatttttgtcctcagctaatcagtgttttttaatttcatttcatgtaacttattttatatgaagctatttatttcatcaatttaactacatttgattaacattacatttttgttatattagcacaaacagctctgattcgatataagaatttatttataataagtcttttaaattcatatttaaataatttaatcaagatttaaatcctcatctttaagatcgcatgcatctaaaaagtcctgccatgaaattttttcttttgagctattttcatataatttagccaaaatttcatccattttatcttcaccaccaacaagctcagatgcttttaaaatttgaagtggaagctttgaatataaacatacgcttctattctctcccttaaccttttcaacatatctttctgacaataaatttaaatattctggatacctataataaaagtttttttcactatactttacgtcatctttccacttattcacataatttttttgagcatattcttctccatagttttccttagcaattcgataggtagtatataccgcaagtccttcagcagaccagttttcattattaccatgccatccaacagtctccactccaaaccattgatgagcaagttcatgagctaatacttcagcacctgaagatccctttgatgtattacttaaattctcatcactaaagcagttttctgtcattgtactataattagggaatcccaatcctcctggaaataatgctgttttctctactatttttaatggattattttcagaaacttttttcagcttaccataatgcttagtacaataatctatagtatatttcattatcttttcagcattcatttttttcatattatcaccatgtttactgctataataaaattgcactggcattttttcacttcctagttgcttcataacataatctcctgccattaaatcaaaacgcgttcctttaagcttaacaagccaagtttttttatcaccctcttctgaaattaacttagtagtatcacctgtaatattagcaatttccttgccattctcatccatctgacatgggttgattattggcataacacctgaaggcattgtaagctcagctgtaatatttgaattatctttgctatctgtaacctgaatttcaggaataatttctttactcattaaatctatatatctattactaatagttgtatctagaatatcatcacttaccatataaaaaatcttaggctttccttcgtattccatagttacattaatatttttcccaacaggcataataaattcagcattagcttctaatgtgtccaatttttttaaaggaacaactttattgtttatttttactactctaatagaatatcctggattaagcttcaatttacacgcctgctcactatcacttagattattaaaagaatataccgcctttgcagaaaggcttcccttgtttccatcaaatgaaatcttaaaatcactgtttaataattgaagctctttattcacattataacgattatcttctgatttatttttaaatatttcaagcaaatcagcaatttgattcttagataatatatagacatctggttgatttacaaaggcatatcctgcttcactgaccattaccacagcaattagaggaatataaattattcttttggaattataaaatatagagacaaataatcctttaccataaatacgtacacctaataccgaaattaaccatactccaccaaacattaaaaaccaaaataatctattatgctccattaagcgaaatacttctgtattactgaaataatctgaaagttctggaactgccggctttatccaacgcataatattaccaataggaacacgttgaaataaattaggtaagacaagtacaataaatgcagcagcactaatatctaatctttgaaaaatctgatataaagctgaagctgctaaaattgacaacatcacagatgggagaattaaaagaaagaaactattccaatacgtatatccatcaaaaactcttcccattttcataaccgtatatggataataaaatacagcttcaatagaaacagtaataattgcagatacctctatagcaattaatctaactgcatttagagctaatggagatacaatgctgctcaataatatctcagttttatacttacgtccttgatcaagcttaagaaaagtcaacatagcaaataaaattcctccaattagagcgccagcaacagttggatttccgataaagtgacctgttatcgtttcgtccaacatactatctttgtacaacttatagccagccattgggctaaatatggttaatagcattactaaataaacaatttttgaatggaaagtacgttttaattccacccttaaatatgaaagaaatttcatgattaattcacctccttacctagttcttatatgttattttttacaatatttttataccctgtatatgttgtatagaaataccctgcatatactataataaatattacagctgtcattaacgctgaaaatctaatatctatttgattaaaatcatttatttcttcgttaactactataatgccaactactgaatgaattaacgcaagaattactggaagactgaaatatattaaggtttgaagaaagatggttttatttatcattttcttatttgcaccaattctctttaaagctttatatctttctatactgtcactagcttctgataattgctgaagtgctaatacagccatacttgatattaaaaatatcatacctaaatataatccaagaaataactcagaagttgaagagtccttttcgttagaataaattctatcctttgaataagcccttatatgtgggagatttaaactgtcatactttccaccaatccaagaattcttgtccatttcttcatattttttattatttccttctctattctcatcggtatacattacattaaggactgatttataaactttactatctggcaaaaactcatcatttattattattatgcaataactttctgccattatagaagtttcaagattttcttgtagagccttatgatttttcgctagatactcttttcctttaatattgactttattgctatgctttaatttttcattaatcggatcagctaatttgttataatttgataaaattaaaacttcatcactatttaaattaacttctttttcaccttttagttttaatattttattgtagtcagatatttttacaaagcttgctgtatagcctttaaaagcctcatcttcagttttaaataaatctttaggttctactgatgaaatatattcatcataagttatatatttttcatttttacttattttaaaatcaattttattaaacacttcatctaaagaaatatcttcaccatgaggatatatgactacacttgcgtcaaatggtgttattttttcaaggcctgcttcataatttttcttaagacctattcctgtagataatacaagtattgtagtaaacagcattaaacatattactgacatggatagaaaatgtgtattaaacttgctatttacctgctttataacgaatatattcaatcccttgaaatatactttcttatttttatttaaaaaatataatataactccagataaactaaaaaagaataatattgtgctaattacactaatgactagtgctggcttaaacattggattccatgtatctatccctatctttaaaaaaaatttatatacagctataagagatactatacttaatacaaatgctactaaatatatatatggatttttaaatttcattttttcattttttctatctgccgcaagtaagtctattattttgtacttagaaacaacaaatacattaaaaatcattacaagtaaaaacattattccaaaatataatatagtctttcctatagcatttatagaaactgtaaatctatattcattcatagaaacatcaaatagctttaagataagagtagataagacttgtgatgctgctattcctaatataaggcctgcaactaaagatatggcacctaccatagaagtttctgttactaaaatcttagatatttttctttttcccattcctaaagtcatatatatccctaattcttttttacgtttttttattagaaaattattagcatacaagattaaactacctagtattactgatacaaacatagaaaaataagacatagtaactgttaatttttctatgtaattagcatttgaagattttatatcaaaaagtgccttttgtgaatctatagaattaaagctataaaatatacagacagctaatattaatgttaagaagtatatagtataatccttataactcttttttatattgccaaaggccagcttaaaatacatcattatcatcacctccaagaagggatataacttctatgattttattaaaaaatttctttcttgtgtccttacctcttatgagttcattaaaaattcttccatccttaatgaagagtattctatgagcataacttgctgtaaaggaatcgtgagtaaccataagtattgtagttttcaaattatcatttaagttttcaaatctttcaagtagcagcctagatgacttagagtctagtgcccctgttggttcatcggcaagaactaaagatggattagttacaattgctcttgctgaagcaactctttgcttttgccccccagacatctcataaggatatttattaagcacttgtcctatttctaaatgctctgctaccgcttgtatttctttatctattttataggtgtcctctccctttattgttaaggctaaagcaatattctcataagctgtaagtgtatctaataagttaaaatcttgaaatataaatcctaactcattttgcctaaacttatctaattcttttgattttaaccttgtaatgtcactaccatttatcaatatctttcctgcagtaacactatcaatagttgatatacaattaagaagtgtagttttgccacttcctgaaggtcccattattccaacaaactctccctcatctaccttaaaacttatattatctattgcttttgttagattccccttattgccataatatttctcgattttttctacattcaatatatttttcatctatgattctccccttttttcttaaacctttgttttggtatcaaatccttcatttagatctcatccagtagaaatttcatacctccgctggaataaacatgtatttaatttcagttttaacatgtatatatccaacctttgctttggatatatatctataatcaatgcacttaacttggctctatgttaattattttatattattatacctgcttcatcaatttaactacatttcattaatattacatttttgttatgttgatataattggataattaaaacttgaaaaaataaaatgcccctttatagaaacagttttattattttaactatctcttataaagtgagcatatgattttcatgtgttttatggtggactctgaagttatgacttcaaaatccataattttttattttaatttctataagatattataaacttttaagaaatgaaattattgctgtactaacctcttctggtttttcttgttgagcccagtgtccgcaatcttcaagaaatatagtctgacggatgtttggaacaatactcttcatttcagaaattatttgatccattccgggaatacttaatccaacatcacgagtacctaccataaataatgcaggaattgttacttttaatccattgaaacagcttaataattctctatttctatctaaattacggtaataatttaatccgccactaaagcctgttttataaaatgcttctgtataaacctctaagtctttttctttaagccaagatgtcattttaggcattggtaatgctgaaagtaatcccttctctcttgataccatactaaatggatttggagttccatcattacctttacgtggtcctgcatctccagaagctgaatacagcaagttatgaactgcaaatcgtgcatctttctcaaattctttttctgctacacctggtgtttgaaaatatagagtataaaataactcctcattattttgtgggaaaacagtggttggtgaaattggtggttgaggcatcattggaactgttaaagctataacacccttgaatttatctggtcttaataatgctgcattccatgcaattgttgctccccaatcatttcctactattactgctgtttcttcatttaatgcatctaacaatccaactatatctccaactaaatgaagcagagtgtattgatcaatattttctggtttctctgtatctccatatcctcttaaatctggcactactacgtggtaacctgcttcagccaaaacaggtatctgattcctccatgagtaccatatttcagggaagccatgaagtaataatacaagaggcccttttccttgttccgctatatgcatttttataccatttgtttcaacaattctatgttttaattcactcattttactttctcctcgtatacataattgtaaataacagcttaatcgtcagattattaaacacgtgttgttgtagcgatttatgcatgctattattataatgtactaaaattagctattcaaccaacagaaatcatgaaatgttggttatttagtaaaaaatattaataacaagaatttattaaaaaatatttatattgcaataataaatttatactcatagctataataaaccaagtgctcaattaaaattataatttaggagcttaattgaaatatccacactatgtaaattctaaataatataattcactcgttataaggatgtctgatttgaattgtctaatagtttaagacaaacttctatgaattaatatttttatagaatatatatttagaaaggagcagatatgatacaaaaatctcaaataaatgataaacgcataactaaatctcgtaaactcatccaagatgcatttctttcattagctaataaaagaccctttgaaaatataaccgtaaaggatatttcagaaagagctaacgtaaaccgcgcaaccttttatgctcattttaaagataaatatgatttactagattcttttatatcagatgaattcatgacaattgtatccagcaggattagtcctgatgcaaagttaaatgaaaaaactttgcgtgatttaatttttattatgtgtgattatcataagactgtaggcaccagctatataagattatataaatctgccaatatgttaattgatatgagagttcagcttaaattacaagatatagtacaaaacatgcttaacaatactagagcctgttcaaagaatgaagacgaaaaattagaattgattactgttatgatgagcagcggtatatattgcgctacgaaacgttggcatagtaaaggtaacttgaaagatgcttctgcagtttctgcattagctgatgagattctttctttcatgacttcttggctaacatcagcattagattaaatttaattactctcaatttatttaactcatacatgaattcttcctaataatctatttagtattcttatgaacacctattaaaattcttctctactaaatatggccatagattttctctcttaaatcgcataaaaacatatggtttatttacgtccacagccttcaaacccgcattattcaagcatattcttcagaatatatatggtttagaatatttattcttcacaatatttattgtaaagaatattagaatacagcactaataaacagagcttaattacttaaagaataaatagctatttattgtctgcatagattttcttatgctgtgaatttaaatattcaatgatctcagttttatttataggtgatgagtgtcctgcaaaacaaatgtcaaactctaaatcctttaatacatttataaaactctctaatttagacggatcacattcacacttatctataataatgttattactccatttgttccgtctactcttattctttgtccatcctttaatatacttgttgcattatcaatagccacaacagcaggtataccgtactctctagctacaattgccgcatgggatgttgggcttcctatttcagtgatagccgcagctgcaactttaaaaagaggtgtccaaattggagatgtatatggtgatacgagtatatatccttttttcaattttttaaattcagaaggatttcttactatgcatactgaaccttcatatactccacgacttgcagcacttcctttaattgaattacaatcttcgctcttatcttgtttaattttttcctttgactcaaatactggaattgaccctgtagctactaaccaatgcacacctttttcatgggcctcataaaccttatcaaaagctttctttcttttatttaatctttcttctatatttaacttgccttctgccactgaattaagttcctcaagaaaaatgaaaaatacatcttctgcatcattaatataatctttctcaactaaaaggcttcctagctttaaagccattctatgcaaacaacctgctattttttctaagtaaaatacactttcctctctgattattaccgtataccttattctctctagaattttagtaaactttctataattatcatattttagccctttctttactaagtcttttgcaactttataagcttcttcctgtttcttaaaactttcttccgaatctagtatagaggcatcgcataataatgcatcaataatttcatttatcatttcaggtttttcactccatgtagaaggtgatatcatacgcccagcacctatagaaggtctatccccatattctttcaagaaattctcaatggcatctttgaatgcttggccgccttttccattcatggctgctgtttgtgctatctttatcatttctttgttctgaagtgcagttctaaaaggcaaagctctaagaagattttctttaacctcttcaaacatttcctttcctacggcttttttaattaacttattaaacttaaactcagtaattccaccaggcataccaattaaagaaaatcttttataaacaaaattctcatattctttcattccctgcttaataagttttataagtttttctacatcatctgtattattttttgcagtatccatcctcttaatccattcattaacttctcctaaaaagctctgccatagaacatttgtatctttaaataaatcattaattgctgatttaggccccttccaaattatagatggagatattgatggcgcctgatagcttaaggccacgcatccactttctctttctataggtatattctgctccttaggcatcttaaagcctgtttcggagaaagaagtatatatcccctgatagaaatgagtaaaacatgcaaaatccaaaggcgtatgtggatatggactatgttccattacactttgaagaccaaaatctgcctttttgccttgataaattattttatcctcagatccaagtatattaaaagcctcccccttagcttccattgttgtaattggtcttgcttgaagtaaatatatcttaccttcagaaagagcccattctgaatcttggggactaccataatgtttttcaacaagctctgctagttttgcaagctgattaagttcatttgatcctagacaataggcttttctctttgaatcaggcactttttctgtaacaattccacttttagttaacttaatattaatctctttagagccaagattcttttcttttatatctccctttttgcttagaacaaatgaatccggagttattaaaccactaacaactgcttcaccaagcccataacctgcacttattaatatttcatctctctttccatttacaggatttgcagtaaacatcactccagccgcctctgaatctatcattgcctgaactacaactgcaagatccaccttaagatgctcaaaattcatacttattctataatttattgcctgcgatgaccaaagacttgcccagcatttttttacatgtttaatgacattttcttttccatagataccaagataagtctcatgctggcctgcaaatgaagccgttggtaaatcttcagccgttgcacttgatcgtactgaaactgacatcttttcacctactcccatttttttatacaaactgtcaaaagctatgtttagttccttctgaatctcaataggcatttgagcttcttcaatccatgatgatatatctttacttgcctctgatatttcattaatatcttgtcccttaatcttttcaagcctttttgttattctctccttaagacctgacgcttcaagatgaacatcatatgcacttgttgtaaccacaaatccaggtggtacaggaagtccagcatttattaatattccaaggttagctccttttcctcccgcttcaggcaatgaatctttatttaattcctttaatattttcatatattttgacataattatttctcctatctcaatgaatttaatcctactgcttataatgtcttaatttaaaatatctaatatcatatttgatgatatatgtagacttctacttattctgttaaatgagagttaacttaggactctttaaagtatttgcataacttaatttataaacaattaattttttcaaagttagttaacatatttaataagtaataaaacaaagcttcatagaaaaaatacgtagacttctacatacttatctaaataaaaagcagcatattgctttttattaatcagtctctccatataaatttttataagccctaataagcagatccaaaaaaacttttttctcctcttgtgacatgccttttaataactgttcttcagtttcttcaaaaaccttttccatctctgttaatatattttttccttttgaagtaacttgaatttgaaaagtacgcccatctgatatcccagcactacgtatgatgcaaccttttctatctaatccatttaaaagattagttatagatgagccttttaaattcataacactctctaaattcttgcgagttatctcgtttccgtgtcttatttctctttcaataagctccaacaataaagcttgaggtgaagtaagatcatattcctttaatttttcgtcatttgtatatctcatcttttgagcaatactctttataaataaatcatacgggtattcccagtttctattcttcattatttatcatcctcactttaaattaggtagacctctacttaataatatatacaatatatcttattgtcaataaatttaaatttcagtatcatttttatcatagatttaacctattctctttagttgtttaaggttgcaaaaaatgaaagaggtaacttttaataatagaaagaaatctattaactagaacttatttctctcccagtatcacttcatctttttaaatttcccttaatactaattatattattaagcaataatacaattttttacttttaagtattaaattcatttattgaccacattggtcaatagagttataatcctcttaaatgatgaaaagaattacttttttactacttaaattacaataataatatttcactaaagtaatgagcataacttaatagcacaaatatttatataaaattctttattaatcttacatagatctgaaagaaggtaatactgtggtatcgaaatttttaaatttagattcagaaaaacaaaatcgtatcttaaatgcagcaataaatgaatttgctgagaaaggttatgagaatgcctctacaaatgagattgttaaagaggctggtatatctaaagggttattatttcactattttaaaaataagaagcaattatttttatttttatatgattattgcatagatgttagcatgactgaattctacaaaaagattgatttaaaggaaagagattttttcgttaggttacgtcaaatccatctgattaaatcagaattattgaataaatttcctaaaattcttaaattcattgaagctgtaaatatggaaaaatcaagtgatatagaaaatgatttaaatgtgataaataaggaagaattagaaagcgcttcaaaaagagtatttgatggtatagatttatctaaatttagagatggcatagatatagaaaaggcaataaacgttgttatatggtcctttcaaggatttaatgcaaaagttctggaagaggcaaagtcatcatcttcaaaacaaattaattatgataaggcttttattgaagcagaagcatatacagaaatgcttaaaagttgtttttataaataagtattaagttttaaaaggaggtattaaaatgttagatatgatcaaaagctttaaagaattaacccctgaactccaatcacttgcaggtagaaaaggatgtatgttatcaaaaatgtttcaagcaggatatcctgttcctgacggatttgtgattttaccatcagcttttaaggagaatattcttaatgaggatgcttggaataaaatcaaacaatatttgaaagaaattagaaaaaataatgaaagtgttttatttgcagtaagatcatctgctttaagtgaagattctgctcaagcttcttttgcaggagaatttgaaacagttttaaatgttaagacagatgaagaaattcaaagcgcaatatatgaagtttttagctcaagagaatcagaaagagtaaaagcatacagttcagtccaaggaatggatcgatctcatcagatagcggtagtgattcaaattatgatacagtctgaaatttcaggagtattatttactgctgatccaattacaggcagtcacgagagcatgaccggtaattttgtatttggattaggagaacagcttgtatcaggagaagcaaatgcatatccgtttaatattatgagacccaaaagaaaatatgaaggaccatctgaatttaagaaatatgcctcagagttatataagtatgcatataaacttgaagaagaatatggtactcatcaagatattgaatgggcagtatcaaatggaaaattgtatatattacaagcaagacctattacaacattaataactggtaatcctgatacatatgaatggaacgatactttggatggggatttcctatggactaatactaatgttggagaagcaatgtctgatgttttcactcccctaagctggtctataataagggctttggatgaagaacaaatgactattcctggatattatttattttcaggcaacatttgtggaagagcatatacaaacatcagttatgcattgtctttataccctgccttcggcaaagatattaagagtctaataaaaacaatgagtgaagtctttggtcaaatgcctgaagaaatagaaattcctatttatccattttcaaaactaggcttgataaaagggatggctccaaaattaaaacatcgtttaaaaaatattattaaagcttctaatgaaattccagagcatttgaatgaatctccaaatttgtgtagaaggatgactgaaactattaaagaagtaaagacaaaagaagaattaatcgatctatggaaaactgaaattttaccttttaattttaaggctttgtggattgcacttgctggtggaagaaaaatggtcatagctaataaattaaaggatgagttaataaaagtagcaggaattgaagatacaaatacacttatgtctaattttagaggagattcatccctcgagagccttggacctattattggtatatcaaagattataactggagaaatgaatcgtgaagaatacagaatgaaatacggacatcgtgggccacatgagtttgaattatccatacctcatcctggagaagatgaaacttggcttgaaaagcagatagaggaatttaagaattcaaacacagatgtagaaaagcttcttaataaacaacataatcaatatgaagaagctctcaaaagattgaaagaaaacttccccaaagaagctaatcattttgaaaagaaaattgtaaaagtggctgaagcagctcgtcttagagagtctgttcgttcggaatggactagggcttttagagttaatcgtgcttttgctctaaaggctggtgaacttacaggcatgggaaataatatattttttctttacatcaatgaagttttagatttgctttcaggaaatgacttagcattaaatcatattgcagttagaaagaaaaattatgagaaatataaatcacttccgccattaccatcaattattcgtggaagatttgatcctttcaaatgggtaaaaaattctaatagaagagttgattactatgatgaatctatgcctattactacacaagattctgaaactcttaaaggttttgcaggagcatcaggaataattgagggagttgtgcatattttaacaaatcctgaagaaggagaaaacctaaaaaaaggcgaaatcttagttgcgtcaactactaatgttggatggacacctctttttcctaaggcttcagcaataattactgacattggagcaccattatcccatgctgctatagtagccagagagcttggtattccagctgttgttggatgtggcaatgctactacaaagcttaaaaccggagataaagttatagttgacggtggtcatggagtggtacaaattttaaatagttgattaaaataaatttactcttccctatcaagctcaatgttccaaaatgacgtattcgtcggattaaaaatactttgaagctctgaccaatgggaatgcgatttgtaaaaaaagacatggtataatataaaaaattacttgctatagagttcactctatagcttatattaaagttggcaggtgaagagaatgagttattcaacaaaagaaattacagaaaaacttaatatgtctaaacatgcccttcgctattatgaaaaggaaggtctactaactgaaattgcacgcgacaaaaatggaaaccgcgaatatagtgatttaaatttggaacagttaataatggtacgatgcatgagagcaactggtatgtctataaaatatattaaaaactatgtcaatatgtgttttgatggatattcgagcgtaccatctagaaaagaaattttattattgcagcaaaaaattttaaaagcccaaaaggaggaaataaataaaaatctagcgataattgatttaaaactgcaatattatgaaaatctcgaaattaatggaccagaaaaatatgatgacagtatctataaaatacattctgatctttctgctaaaatgatgaaaatattagataaagaaactgatactcaaagtaaataatctgcttcaatgataagttcttatttacattggtaaaaagacaattaatgttttatttactgtatgaacttaagttgcagtatatattaaatacaatattaaaagaatggatgtgttttttatgaaattaatgaaagcaattcaagtaagtaaacctggctcagcttttgagttaatacaaacggaaattccagaaccaactaaaaatcaagtaaggataaaaattctagcttgtggtgtatgccatggagatgcattagtaaaagaaggaggtaattatcctgggctttcataccctcgtatccctggtcatgaaattataggtgttgtagacaagattggctcagatgttactggttatgaattaggacaacgtgttggtgtaggctggcctgctggtataacatatgatggaggtttcgctgaatacatggtaactacttcttctgaattagtaagtataccagaagaattaaatgaagtagaaggtgcacctcttctttgcgctggtgtgactacttttgatgctttaaaaaattctggtgcaaatcctggagatgtagttgcaatacaaggcgttggaggccttggtcatttagctatccaatatgctaagaatattggctttaagactgttgctatttcaaggggatcagataaaaaagaacttgctgaaaaattaggagctaacatatttatagctactgaagaacaagatgcagcaaaggaacttcaaaaattggggggagctaaagttatcctcataactgctccaagcagcaaggctgtatcagaacttttaagtggtcttggatttgatggaaaaataataattgttgctggaataaatgatccgattcaaatctttcctaatcaattattggttggaagacaaagtatacaaggatggttagccacagatgctaatgccagaaaagatactataaattttagtattctaacaaatgtacactcaatagttgaaacttttccactagaacaaataaattcagcgtatgaaaaaatgatgactgctaaggttcactttagagctgttttaactatggaataaaacctttaatctatcttcagtgaaattcactatttttgatgtaattatatgtactctaaaaatttacttcgtcgaaatttatcttaaattattagcttaagcgaaccaaataattttataggaatttaatgttttataatcaatataactggaaaataaatttccagttatatttttaagcatttctaaaaatagtgaaaatatccgtcgaagtttggaatctttaataatactctagcttataaaacatgttcaatttgtataacttcgttatattttataaatattgtattataatatttgtttatcatatttcttcctggtaatttaataattcattacatagtctaagagcattttactagcccctgatagaaagtaatcttttcgatgtataaaatttatctcccatacaaaagtttcatctgcaaaagggatcgcgcgaacattaggataattgatatcgattacaacaaagtcaatactaataccaagtcccttattaagacgactaagtttgtgaacaatgtgaatttcagtagtactaaaaacaatattaggttgaaaattagcctgtctacatttactaataaaattatgatatattttaaaattttgatttgtaataataaatctttcatcctttaaatcgtcgaaatttatcttactctttttagaaagtggatttttttcatttataagaacacatggatgttgtgttttgacaactttcgaatgaaattttgatttatttataggaccaattgtgaatgctatatctaaatcaccttttaaaacagcttcttcacaataataatctggaccttcatatatatctaattgaatttgcggatacgttttcttaaaatctgaaatcaaatctgtagataatgcatccagtactcctaatgaaaaaccgactgatagtttttgcgactcaagatcattcatttgacttatatcacttagaaacaaatcaaattgatttaaaatactcatagattgctgttctaaatattctccgtactttgtcacttcaactccattaatcttacggtagaataatggaacctgtacatattcttccaggttcttaatagctctgctcaacccttgctgagtaatataaagatttttagaagcttttgaaaaacttttatctttgcatatttgaacaaaataccttagtagctttacatccatttagaatcccccatttaatcaacaatttcgcatttgtatataatatatttgtagaatatattagtaatttacccataattgaattctatattttaattatgggtaataatagttactttagttactgagattcatattactttagtcatatattctatatagaaaattacatcataatgtaaaaagtatattactttagtcatatattttacattaaaaataatggtataataaaacatatatttattataaaatgggtgatattaaaaaatgctaacatttagaaactatcttctgattataaagtccatattatttttatcaatattaacagatatctacatccggtataaaaactctcttttaattatgattttattatttgtttttgcaactataattataactaatgattatcttagaaatataagatttaaagatcatactaaatatgtacatatatcactattttttagtctatgcactagttcaatactaatctttactatagatgggattagtacttatttttattattactcttttttatttgagatttttcagtttaaaaaaaatatgttaaaattctttatcccaatacatgtattacttttgtctttctacgctattggtttgaaatcttataatcttaattcaattagttattttttaattttcattcttagtcttttatcttatttaagcattttgggaatgctttacaataaaagaaaacttgagatggaatcaaaagaagtaaaacagcttaacgaaaagttaagattagctaatgtaaaacttcaagagtgctctttagaaatagaagaagttgctatttctaaagaaagaactagagtttctcaggaactacatgattcattaggccattccctcgtcgctttagttatgcatctggaatttgctaagaatatctgtactactaaccctttaaaattagaagaaatattagcgcaatctgaaaaaatagcaagagcaggtattaatgatttaaggaaaacagttgatttgctcaagtcagaacctgaagtacaggatttaaatgcatcactaggacaactaattaataatttttatttatttagtaacctaaaaattacttacactaaaagtacagatattgaaagcttaaatccgattataaaaacttcaatatacaaaacaatacaagagtctataactaatagcttgaagcatggtaatgcaacaaaaattaatatagaaatcataaaaaatatcaataatgtaaaagttatcattactgataatggtataggttgcgacaatatacttaaatcaaatggactaaatggaattgaaaatagaataaattccttagggggtgaaatatcctattttagctataacaacttaggatttggtataaaactctttattccaatataggagaaatggggggaattattaaatatgataaatgttgtattagttgatgatcaacaaattgtacgagagggtataaaaattattttaagtttagataatgaaataagcattctaaaagaggcagaaaacgggaaacaattgctaaaaattctccaagaaatacagccggatataatccttatggatattagaatgccatttatgaatggtgttgaggctactaaaattgttaaggaaaagtataacaatataaaggtaataatattaactacttttaatgaagatgaatatgtattacaagggattaggaatggtgctgatggatacatacttaaagatgcaagatcacatgatataattaaatccataaaggcggcttacaacggtgatatccttcttgatcctgcagtaactacaaaattaattagagcttttaattcaatatctattgacaagcaaaattctaggataattaataaacaaaaaaagaaattagaactgcttacccaaagagaaatggacgttgctaaacttgttgctcaaggcaatagtaacaaggatatttgccatactctatttctaacagaaggtacagttaagaactatttaacaaatatattcgagaagttagaattaagtagcagaactgaattggcattatttattaatcaaatagagccgtgaaaataatggcatatttaaatttaatataaaaaacatatagtcctttcttttatatatcaaaataaagtaggttcatagaatattaatttttgtgaacctactttattttaatatatcttaacattatgattcttttatcaatatttctctcttaaatattatcttattataagcctttaacttctttccaaaatccacactaaaaaccacgataaatattatatgcaattaattctggacatatcgatcgataaatgactataaaatcccttagtgcttactactcaccatacgtatgatgacttgtattttaatttctatcattctttaattaattaaatatttattatctaattaacataacttttcaatgcagtctgtattaaaaataggttcatcatgtggggaattccccacaaaatgaacctatttaaaaaatattattttatttctaagaaagccatgaaccactgctatctattgtataaccatctattactgtatcaactgccatctctccattagtatttaagtaataccatttttcattagcatcttttaaccagcctgtcttcattgctccattattatctaggtaataccaatttccatcagtatccttaaaccatcctgtagtcatagcaccattattatttaagtaataccatgatccatcagcatctttaagccatcctgtttgcatatttccagattgatccaaatgataccagctgttaccatcctgtacccatccagtagctttttcaccatttgagtttacaaatgaccaagtaccatctaaatttttactccatttatttttagctgttgtattattggagtttgcattgtttgaattagaagttgttgatgtatcaccactagtgctatatgaaccgctgctatggtggtgtgacgagctaccacttgacccattatttcctgatccattttcatcttttgtgatttcacctttatcaaatgtcatataattcttaagatcattatatttttctgtataggatttagcctttacacctttatctttatacattttttcaaattgagttgattgcatgattatatttaatacattcatagcagatttttgaagatctcctaagtaaattgtattattatctacgtattttccataataagtaacaatcctatcacgagaagtatcagtcattggatctaaagtaacttctactgctgcatctgtagttgtcgctatctctgccggatgtattatctctggttgttcctctgttggctgtgttgttgtatcaccaattggtgccgtttcatctcctactggcgatgttgttgtatcgcctgttgatgctgtttcatctcctgctggcgatgttgttgtatcatctgttgatgccgtttcgtctcctgctggcgatgttgttgtattatccgttgatgccgtttcgtctcctgctggcgatgttgttgtatcatctgttgatgctgtttcatctcctgctggcgatgttgttgtatcatctgttgatgctgctgtatttaataacgcttgtacgttatcaaacgaagtttctattgttgtttcggcatcacttttagcaaattccacacttgcctttccgtcgttaatcatttcaataaccttgtcatttaaaggtattcctttcttaactatagtagatatagttgtatctccatctgagcttggagtaaagtcattccattgttccacagaagttccttttccataataatcatatactgttttactagccacatatccatcttcattaaatgcaggtatataatcaaatactgcttttattatagcgtcttgagtagctcctggcataattaaatcattacctgaatgcatagattcatcaggttttgcttttgaataccaatcagtcattacaactccatcaaatttccattcaccacgtgcaatatctgttactaaatcatagtttgctcctgcaaatactccatttatcttgttgaaagctgtcataatcgacataggttgtccgcctttgattgccatttcaaacccttttaagtaaatttctcgtaaagccctttctgaaattgtttcatttacaagatttctgttgttctcttgattattagcagcgaagtgttttattgttacaccaatacctagatgagattgtacaccttttgtagccgctaatcccatagtacctgttataaatggatcttctgaataatattcaaaattacgtccacaaaaaggatctctatggatattcatacctggagcaagccaaagagtgactccaaattcaaccatttcgtctcctattgcattatgaacttcttccataagatcaagatcccaagtctgagctaataacgtaccaatcggccaagctgtagcatattgataccatgtcttcccatctttatcatattgctttgtaagacgaagtcctgctggtccatctgctaaaacaatattaggaatcccatcagtttcataatagtctcctgtagtttcccctgccccacctgcaacagcatttgattgtgctccaacaactggtgtttgtgatacagctgtcccgataccgttaactatgttagccaacttttcagtcgataaaccagcaacaaattgttccatagttatatctttattataaacatcatataatgtagcatcttttttcacatcaatattttctcttatttccttatatgaaggagtttctatattgtcaacactattttttagagtcttattttccataatacttttactttgagcttcatcgctattacttacatcaaatatagcagctccattatcatcatatttaaatgcggacgtatcgtctacattatctacatataaaaacttctctatattcatatcattggaaacattatctaatgtgctattcttattctcatcaattgtttcatcagtttctacatccttataattagcagccgcatctgttgtggtctcctttttaccagcatcatttgcaatataagttgtaactgtttcatcatcatatttagattcattattaccgtcaattagatctaatgcctgtgaatataattggattttttgtgcatttgctatttcattgccttcttctgcatatgaataaggtgtaactcctttatctgataaagcttgtacgctcttatcggtcttcatttgattgctaagctgttctgtagttacagtttcatctaatgttaaaacagctcccacatgtgtatttcttgagctattccctacgcggataatgtagttacctttttccataatatatgcagcatcatcttcgctataagaagacatctctgatgtatcataacttattgtaattgtttggctttgccctggtgctaacaagtctgtcttaccataaccagctaattcttgatatggcttatctaattttccgctaggtgctgagaaatatacttgcgcaacttcttttcctgaataatttccagtatttttaacgtttacttttacagtaacatgcttttcatcagcttctacagatactacattcatattaaaagttgtatatgataatccatatccaaactcataagcaggctttacattaaagctatcaaaataacgatatcccacataaatatcttctttataatcttcttgatcagtgttcttatcattgctgctgaaagttttagaagatgggtaatcactatagttttcagcccatgtatctgtaagttttcctgaaggagttacttcaccatttaataccttcactgctgccgtaccactttccattcctgcttgagacattagaagaactgagtctaactctggaatttctcttgcaaattttgtatcgataatgcccccaacgtttaataatacaatactatttttaaaagattcagccatcttcttaatatttgcatattcttcatcagttaaataataatctcccttcttcccagttctatcagttccctcaccagacattctgcttataacataaattgcagtatccgcattagaagaagcttctatatcatcgtctgttaaattataatctggcaaactatatggtgccaagtaatctttatacggattatttttatttttttcattccaatctgcttgaccttgatcaaaagtcttttgataattatctaaccattgagagcttgttatattatatcctgctttttcaagtgcatccgctacacttacatcatatctctcgtttacatttccagcacctgcaccaccttttagagttttaatagctccacctccaaataaggctacattcccctttgatactattggtagtgcattatttttgttttgtaatagcaccattccttctattgctgctttcattgaaagattagcatttttcttttccctctctgtaactgcatttgaagttgtagccccataagctgaagtatacgctgacacaaaagatgtaacacaagttgtaacaaacattgtacatgctactgcacttgccgttaatttacttaatataagttttcttttcattaatatttcctcctattatatttgatataatattacattattaattagaaattatagccttcgaatgacgaaatctattattcaatacattgttaaaagcctcttatcattcaaatttaatcctttacaggttttgcttcgagttaattgtatatttaaagtaactattttaaaaacaatataatgttgtatccctacaaataaaatttaagagaaaagttcttttaaatgatatgaaaacgtgttaatatcttactgttactcataatctataatataaatatcggatagcattttattaattgggatatagcacaagtagtgtgtgacaactttggctttaaaccaacataatatctgctaccaccaaattaaatgccggaagttttaattcttccggcatttaattaattacatatataaattttttctgttctaatactctctagaaccaagacgcttatcttattaaagtagaaacttaatcaaaatttattgttgttcagttaaatttttatatcttagccttaatcagatacttgtcttactagaattttcaatttaaatttatcataaaaacatatatatagttaaaggaataaaatccagaaaatatccttggaatttatgatcttcaagaatattttcttaaatagctattggtaaaaatagttattcaacaacctagttaatcattgcaacgtctaaattgggttattaagtaaacaaattttataaaaaacaaataaacctttcctttatggtataataatttctctaaaaacaaatacacaacataagaaatgactcaaaatatagatttttgctgaatatatggcaacctcttcttctaaattagtaactatactagaagaattaaattaagtagagagtgcattactactttgcactgacgcgactacttttgatgcttaaaaaaattatggagatgtagttgcaatacaaggcgttggattttctggtcatttagctatccaatatgctaacaatatagactttaagactgttgctatttcaagggtagcagataaaattcagagttatttaacctacatccgctaacacctcattatttcagcatactctattattcttcaccatatttattacaaatgataccatttttcacttagatattaaaatttcgcaaaaaaagaatatcacatttccattgctgaataatgtgacattcgaatctactaattattttgttaattcatatatgataaacttcaccaccttttactttattaatttgtttctgggaatactgcttttataactcctgaatcggcatcatttgttgctattgctccatcaaccttaaagtaatctttaggaacacctattattgtataaccttctttaggttttattgttattgttgctgtatatactttatttgcttcaaatattgctggattttcattccattcaattgttgctgtatattgatcagtatcatcaattgttgatactggagtttcacctgttactggtgttgcaactgtaatagccgctcctgtagtaactcttatatcatttcctatagtatcagatattgttgatactggtgttgcaactgctgctcctgtagcgacagcaatgtcgcttcctataacagtatctactgacttaaatactgtatttctaaattcggtatttgcattccaactcattaatcctacataaccacttctttgagtgaaatctgatgttgacaataattcttgtccatttataaagtattttactgtttgaccaaccacatctacttttaaatcatattttccgtcttcagttggagtaatattaccttctccaatcaaacttccgccaaactcaaatactttccaatgaccattatttgtttgaacattaaatacaaggcttccatcctttggattatctttactcttactaaataacactaaagatggcgcgcaattatcatctggatttaatactgtagcctctgtttctaaattataattagcatcattggttgctgaaaccttagtgcttgacattgcaaatgtatctccagtactctttaccgcataagaagtgtcacctgtatttgtagctgtcttaacataccattttccagctccagatgtagtaaagttctttagacctgttattaatccaggtgtagcatctggattaatatcgtatccagatacattaattattactggagaagcgctaccactaacaggagttactgttagtgttgtttctcctgctcccaccaccttgaatgtaattttcttgctatctgttccatttataatttgtacaacatcttgatttccaatcttatatttaacatcttgattagcataaacagtaaattcatcacccatgttttgttcataatttgttttaacaatgcctaagctagaagtatcgctgcctgccactgtaagttttgcatttgtgaacttaacatttccattataaatattaaatccaaagtttcctggcgcagagaaattataatctacttcatccattagcttatcatttatatagtattgtatatgatttcctttcaacactgccttcatatgatatttaccatttacatctggtgttatatttcctgaaccatgttcattatctggaaggtttgctcctcctgggaatttaaataatctccatgccccttctcttgtaagattagctacaacacttccttcacttggcgaatttttcactgcactgcctaacactagccctgcagtaccttttgcaatctcaacatctgtctcaaaagtatatgttgcagttgaatcatagttcttttcatctaacatagcaaatccatcaccagaaccattagcaacataagcatcaccatctttataccaatcacttccagatgcctcaacattgcttaaacctgagaatgtacttggtagactacgatttacaactgataatgttgtagttttttgtaattttccatctttagatgttgcaattaggttagtatttccttcacctaatactctaaaggttgtttttttatcatcctgacttaaaattgtaacaatgctatggtttgatatattccatgtaactccttgagttaatgtacttggaagtacagaagtatatatagtaaattcatctccaacttctttatttagggctgattcacttaatgataatgcacttgcattttcattattccaaataccctttaatggataataagtaatattagcttttgtatttcctccaactgaatatacctcaattccagtactgttacgatctgggaatatttgtgctgtacctgctacctcaccatcattcccatatacttctacagatgctgcatcaacaaatatatgcaattgaatcttaccatctgctgttttatttacctcactactatatgagtttgcaaatgcgcttccactaactggtgtttttcctgattttgaacgatcaattactacttctcctgtttctacgtcatacttaactattgtttcttgattcacatcttttccaacacgtagtttaaatccacattctgttgtagttgcgtctggttcaaattctgctacaatttcatattgacttcctgataaattatttatattgatagcagcattatctgcagtatttgaagaaattacaccatcgtatgttgtaggtgtttgacgtaatgatttatattcctcaatcggctcttgtattaaacgaattccatcatccgtttgaaccaatttaagttcattttgtaaagtatatgatccattaaatgttcctgttattttcttaacttgattacagtaatcccagttattcatccaattgatcattattcttcttccatctggagtaccattttcacctgttccataataagtttgtgctgcatatgaatccttactaaaattcatttgtatagcacctgtttccggaacaaatgtccactttccacctacttgcttaaagtcaccaattctataatatcttcctgcttggtttaatacccacttttcttgatcagttccttcaactttcattttgaagaaatctggacattctgtagtaatttcaggttgcatagcttctggcttccaatctattaaattatctgatgagaaaaatcttaatggaccaccagcaactaccataaaccattttcctgcttcttcattatagaacactttaggatctctaaattcagccggtctctttaatggatcatcagttatttttaaaactggttctccaccattatatttagtccaagttcttccattatctttactgtacgcaatagattgttcttctgtatttgacacggtgccatgagcaactcccagataatcacattcttcatctgtaagtttattaccctcaatatgttgagtatatatagctaccaaaccactaccaccatcaaagaagcctgtactatcattttcatcaacaacagctgaacctgagaagatatatctagaaccttcacccataaccttatcatcacctggctctaatgcaactccaagttctttccaatgaattaaatctttactaacagcttgtccccaatgcattggtccccacacttcatcatcaggataatattgatagaatagatgccattcaccgttatagtaaaccattccattcggatcatttccccatgccttagcaacagagaagtgatactggtcacgataatcttctagataattagttgaggtacttgaatcaacatctttattaagactatcattaaatatagtcgtagccgatgcaagtgctgttactgctgaatctatatctttttgcgtagaacctgtattatctgaaactgcttgtgctgcatcaatagctgctttaaatatggcctttgatcccactgaatattgacctgcatcagttccttctactgccgcttcatattttgtttttgcaattgttattgcatttattagcgcttctttattaactttagtgctgctgctaccgctgctatggtgagatttgccactacttgtagtacttgttgagttgctttgttcactagttgttgtatttgatttattattatctgatgttttatcgctactaccttgagtacttgtttcaactactttaactccatttgaattaaatgtcttagttggtactaaatctgaccttattgcttctccactctgtgcaaatgtatgagttgttccatttattgttatgtctcctaccctcatagctcctgtagtttcatctaaataataagtttttccatctatttttactactccagtttgcattgttcctgatgtatctgcaaaataccacgtaccattatcactaatccagcctgtcttcattgctcctgatggctgcatataataccatgtaccactatcatttatccagcctgttttcattgttcctgaattatctaaatagtaccatgcaccattatcgttaacccaacctgtcttcatttctcctgatggctgcatatagtaccatgtactactatcatttacccagcctgttttcatcgttcctgaattatctagatagtaccacgcaccattatcgttaacccaacctgtcttcatttctcccgaatcacttaaatagttccaattcccttcattttgtatccaagctgctgatgcacttactgaagtaaatgttgctgttgtcatagttgcaactgttatcgctattaactttaactttaattttttcatttttttaccccttttatcattattttttagaagtgtttatcctttgattctataaatataattattttagtacttttaaatttgtactttcatatgaatttactgtactatatgaactcctctgccttaggtaacgtttactttacgattaaattcactatataatcatgagaatattgtttttaatacaagtatagactaccctactaatttaattaatgttagacctttaatttataatattaattaggtaatctatactgctataataaatttcaatttaaaatggtttacttaaaataagactatgaattaatgtttattgtaatattccagacgcaactcctaaaatccctactgcgaacaatccaaagattattaataatggattcacgttcttctttaatagatacatacataaaaatgttagtaaaagtggaactaatcctggcattaagctgtctagtacactttgaatagttgtaactacttcttttccatcagcttgtgtatatttagagagaacaaaaggtatattaacagttgtccattttgaaacaagaccacctataacaagtaatccaagtactgaagcaccttctgtaagatatctaagtttatttcctcccatatcagcaactaattgagttcctttttcatatccatagaacattccataccagtttgttgcaagtcttattgcattgaatcctatgaagaaaattagcggtccaattatacttcctgtaagtgcaagtcctgcccctaatgctgcaagcacaggtcttagtgttccccagaatattgggtctccaactccggcaagtggtcccataagaccaatcttaacaccacttattgatgcctcatctatatctgccccatttgccttttgttcttccatagctgctgttattcccataattggcgttgccataaatggttgtgtattaaagaattccaaatgtcttttaagtgctgcacttaattcgtcacctttatataatttcttcaaagctggaattaatgtaacacaaaaacctattgcttgcattctttcaaaattaaatgatcccaataagaaatttgaacggataaacatttttactatatcacttttatttaatttcttttcactcattattttatctcctttctgtaattacattaggtctgaatcatcgatatcatcaatacttccagctccagctactgctactttaccttcattagctattgattttatatggaatattgctgcaataacacctacagcaccaaaaccaattaaattgaagtttgtaaatgctgctaacaagaatccgataaagaagaatggtagtaatgatttactattcatcatattcattaccattgcataaccaacaactactataaatccacctgacacttgaagccctcttgtaataacttgtggtatagctgcaagtgctgcatttacagcatctgtacctgcaagtacacctacgattgcagctggaatagctacacgtattgcttgaagtgataaacctagaatatgacacatttctattcctcttgtgttacccttttcagcatatttgtcagctaaatgttggaagaacactgttattgttcttacgaaaatagtaagaacttgtcctgctgctgctattggaaccgcaactgctatacctgctccaattgactgtttaccaattatgacaagtattgctgaaattacacttgcaagcgctgcatctggtgccatagctgcaccaacattcatccatcctaatgctaacatttcaagcgttccacctagtataattcctgttttaatatctcctagtacaagacctactagtgtacatgcaattattggtctgtggaactgtgcctcatcaagtacacttgccataccagtaattgctgcaactattactaataaaattaattgtaaagtgctcatttataattcctctctttctttttttgatttatataaaaaagtttttatatacttatataaattgtaattcctttaatctgtccattaagtttatcttagtatcttttgctagtttccttacctctaattcgatacctttttcattaagctttttaaacgcctcaatatcaatatcattcatgcataatgcatttgtaacctgtttatcaccagccttatagcacattcctccaacgtttacagatttaataggtactccgccttcaaccattcttaatacatctgtagggtttgtaaataaaaataaagttttaaagctgtcaaatttaggattattatatgcttcaattgcctttgctattggaagcacatatgcttttatccctggaggagctacttgaattactaattgttttcttaagtcatccgctgcaacttcatcactgcaggcaaatattctgttacacccactctccttagtccaaactgttgctacttgtccatgtattaatctgtcatctattcttacaaagctaatttccattttttatctcctatcttctaatttttatatttacttaaattgcgcttatattgatataacttgttgcataaattttcaatattattttccaaagaacttatgtattcgtattctcacttaactttgcttattataattatggaactaaaaatgcagttatctgaaatacttatataatttcttcatcttcatctatattgatatttttagttaaaacctttatagcctcttttccagagttttctgctactcttaacaattctgttatgcttgaaaaatctctacttcctagaacctctaaaatcattggcagattaacacctgctacaatttccatattctcatgttgcattgcaattatacttgccgcattaaatggacttcctccaaacaggtctaccataaatagtactccgtctgttgaatctaactcttttataagagtgttatatttttctacaagtgattcaattccttcacctggtttaaatgtaacggcaccaacattttcctgaattccaaaaatcatttctgctgacttaagaatctcttctgaaaatataccgtgggtacctataattactgagatcattactttatcatcctttcttgctacatatattatttttatatttatatacatagcaattcctatgccaactaaggatgtaaataaaaaaatcatcaagaaataaggctataactaccttttctgatacttaactatttttgattacactatgaatttaagatttacatacttcaaatcacatttaacacagtttattaaataattttgtagaattaacacacatatatataaaaattaactgccactaacacacgatccttttagatccatgtattaatggcagttaacctttatatttcgtatttttaagtcataattttttatatattgcgattaagtttgtaaatcctagttttaatagagcactcagcttaatggagttttaagcttaaaattattatcacaacatatatactaatttaaatttaatgttttagttaaattcctacaccaaaacaagcttcatccaattatatcagcaatataataaatttcatcatctgttagatttattgataatgcatttttgaaaatcaaactcgcttccttcaatgcttctatagtttctttatgaaaatttatgttgtcatcatcatatactaatccattattcagtaccattctttctaatgcgcatgcaacatgaaacatgattcgtaatttaactggattttcaaattttaccctcaataacctttcagtaatatccaaaaattcatctaatagggaatagatcttttgtggattaagaaatgttataaattcagcaatagtttgcgtacaaagattttcaaatattatttgcttatctcccgtattttttatagcttctatctttttaccttggataatacttattaatatattctcccctgttccatcgattaattgttctatagatataaagggaattccaagattaggatttgcaatacctataatagccaaaatattattttcttcctgaatcttcttaattgacttagttaagttcttcagaccaagtgaaataatattaacattcttaacacctatattatttgtaacagtctcaactaattccttaagctttatagctgccccttttccagtagaacatacagtaattataaccttatttttttccttagtttcttgaattgtctgcgtgttaatattattagtgtatcccctaaaatcagtaagtaaatacgaatatactgaatttaaatcagcgtcacaaacagaacactttctaacagcttctagaactagtggagttgaaaccatatcaatactttttatgtttatccctgttttttctgtaataacatctgcaaaactatttaaagatcccatatctactaagagtaatacgccttttccctcatcaacttgcttaactttttctataacattctccaaaacatctgatggtgatctttcaagaggcatatcaacagcaagaatattgtcagcttcaaatagctttttggctacactagccatgctagttgcaattcctgccccatgtgatgctactacaatcccaactctttcttgacgagatgattctcgtattgaatttaataataatgctaaatattcaatctcaacattaggtatacttagattaaagttcttctcaatgagtgcatgaatttctttagcaacctcatattctttactttcaattgatatcgataaatcaatattggactcataagaaacagtattcttcttaatcctattaaataatgcactaaaatgaagacttgttgcatagataaaacgttcatttaattttctattcaatctgttttcagctagtatttttatcttttctgaaaattccacaatatttttatcaacaatctttaataggccttccctccggcttatatcattgttgaatcgatcatagaattgttttaaatgaatgctaatatctgtagtaataaatgtctttatttcttcatcattcatgccctcttcttgaagcacagaagttttactctctattattctataaatattaaatggtgtttcataatcatctgtttctaaaaattttctatttccatctggctgaatcgtaatattattaggaatcatattccatatagtcgttttatctttagtttgatttccaaaagctaatattccgctttttatgtttggaggtaatgtacttaaatttatttcaatgtccttatttgtgttaatacaattaaaaaatccctttgcacaaaccaactgtatattagattttagctgtcccacatttccataattagtgctgcctatgagagctttaattgcttccgaagaaatcttaatagttttgttcactctctgtgcttctttagaaagcaaatattgtacaagatccaatttttcattaataggtctttcatcaaaaggtggaatagttattgttatagggattcttctaataaaagtcttaagcagcgtagaatttggatcctctgttgtagctccaattaatagcacatttgctttatgctgtctatctgtttcgcctaatttgttataggttcccgtatccataaagtaaaataccatttcctgcccttctggtggtaatctatgtatctcatctagaaacaatattcctccatcagctttttcaactattccttccttttctttttcagctcccgtaaaagctcctttgacatgtccaaatatatgtgatagaagaagttgaggattattagaatagtcagcacaattaaatattataaatggtggatcctcttgtgactgttttatatttttatagtatttatacatcatattagcaaataaacttttaccaacaccagtactaccaattattagggtatgtaacccatttggtggatataataaagcagcctttgcttgttctatttgatttttcaaacttgtattaaatcctattaacgagtcgaaaggtgatttatcttctttttcctctaacaaattgataaaatcattaatttctataccttcttcacatttatcatttaagtttacatttaatattctaataaactgttctctatcaaaatatagaacaggtctatctttaattttaattattttcttttccctacaaagagtattaagctctctagaagcattgcttcttaatattcccaagtgttcagcaacttgctgcgcactaaatcccttaatttcaaataatttttctttagtaaattccctagaatttgataatatatacttataaattttatcaatttgcttcatggcattatcactttcctttaatccctagttttaatttttagtacttaccattatatatccaaagctataaataacacttatatttaaattttcaactaaatacttacctaatttcttatttaaagcaattattatgccaaacaagagtgtaaataaagcatattatactaaatttacgcttaagcaagcttcacttaataaaaatatttactctttacactcttttttttaatttacacaatacagattttcattaacacactttttctcttattttttagtacaattacattctaatattatttattgtattttttcacactagtatatatattacaattgaccctctaaatttttacctagctgggcactttgcttattagaagtttaaatacaaatttattactgcattatatattaaaataaatttcttacttcacttaaaataggcattgatgctattgctccataatttgtacatgtaatagcacctactttatttgcaaataaaattatgtctttccattcttcaaatcttatattttgtttattttcaatatcagatacttgttttaatacggctccaacaaatgcatctccagcaccagttgaatctacttgcttaatttcaatggatggaattatttcacgctgtccatcaacacttaagtatgtcccttcagatcctagcgtaatagttacaaccttaactcctaattcatgcaatttattaactcctgctattacatctctttctttagttaatagaaataactcttcatcacttagcttagtgaaatcactttttcttatgaactcaacactatcttcaataaacatttctaatttatctggtgttattaatgcatcacgataattgggatcaaaagatacatatatattattcgattttgcatattctaataatttaaaatatgttttctttaattcaccctctaaaaatcctgtagcagaaccaaaatgaataatatctgagtcagctatttttgataaattaatattattaaatgaatattctccatcactgcctcgtagaaaatcaaaattacgttcaccatttgcatctataccaactagcgctattgttgtactacctttttctactgtcatttcagtatttatatttaaatcttttaacaattctattaaatgttttccaaagtagtcatcgccaacttgtcctaaaaaataagcatttccatctaatttagagatacatgctgcaacatttgctggcgctccacctgcttttttctcaaacctttctccgtctttcaatcctttattatcaacacaaaccatgtcaattaaaagctctcctatacaaaaaatgtttttactcatcttaatcctccatctatattagtttatctttattaaactatagcaatttgctttgtaaactaatatttgttgaaaattttatacttatctatgtatctaaaagtggctgaattataaagcctaatttagtcgcttttttaaacacatctaaatataatgcttaatttaaaacaatactatgcttttcaatacttacttttgcttcacccttagcacaaaacgaaatatctgttgcatctaagttagtataaaaagtagatgtcattacttgttcgccatcatttgcaaatatttcaacagaatatttatctataattaatcttagtttaatctttccattttgatttcttatattcatttctctcttatgtaaggaatcacaaagtttccctgaataacttctatcaaatgaaatgatatcttttcttggatcaaaagtaactaatgtttcatagtcattatttttagcaattttaattacaaactcttcgcaatttgaaccatcaatttccagagtcatatctaattctcttcctgatataccttctaactccacattatctttaattaatacattctcgtatttaacagaattcttatagtaatttctaatttctctaattggattttggattagctttccatcctttattgttagttctctaggaatgctcatcattccgcaccacttaaagtcttttggaacaatattattttcccatgattgcatccatcctatcataattcttcttccatcttctgcttctagagtttgaggagcataaaaatctaaaccaaaatctatagttccataatcttctctattaaacgtatgcttttccttatcatattttccaattaagtacaccgtattatgtccattatggaatttcagtccattcgcctttacttccattggtgaaataatcataatattatttccatcaatcttaaaaaagtctggacattcccacatgcttccaatctcatttttacttctatctagaatacaaacaaagctccattcttttaaatcacttgatttatataaaagaatttgtccgcttccatcagcatgcctgctagctactacagcataaaacccatcagcttctttccatatcttaggatctctgaaatcttctaaattactaccttctggtagagaataacttgttatcacaggattacaagttagcttttcataatttactccatctccagttgcaatacattgagtttgtctaattatatgagccccatcttcttgaactttgtcaaacactccagtatacatgagtatttgctttccatctgactctactgcacttcctgaaaaacatcctcccatatcatattcctgatctggcgcaagagctgctggtaaacgttcccaccttataaagtcctttgtcttactatgcccccaatgcattggtccccatttagtatcgtatggataatattgataaaaaagatgatactcctttgcaaatttagaaaatccatttggatcgttaatccacccgactggtgatgataaatgaaacgatggcctctgttcttttggtatactctttatagattcttcttcaaaaactcttgctttatttaaaatttcactactatttctcactatattattcataatcatttcctttcaatcatcttaaatattatataagcgaccattcaagccgcttatataagttttttattttgcaaagtatgaatctaaatatttttgtttaatttctaatatttttgataaaccttgattatccatttcttttaaataagagtcccattcttcatctattccaccatttaaaatccattcagctttcttacgttctgtatatgcctttactgctgtttcatattgagtaagtttttctatatcttcttgagacataaatacaggtggataattgtaatcagctttcatatctttaacataagttttatgaagtatatctaatctttcttgggcatcatctggagatgttgtatactttccataataaccatcaagaactgctaatggtcctgaaacaaattgatttgcacgaacttcccatggtgatgctgtacctaattgtaaatgctttaaagttttattttctgttaactcaaatacattttgatttttctcatcaccatatgttccccagttatcttgtattgattgaagaggatcatataacttatctatccattttgctgttaattctagatttttatttgccgatgttacaacacatcttcctaaatcaaacccatatccatttgatctagtagcattaacagttccattaggacctgcaagtgctggaagtggaatatagtcatctttgtttgcagctatattagctctatcccatgtgaaaaacataccgtaacgatcattttttccttttgctacaaaagtatcccacttttgagtaaatgcttctggatctataagaccttcttcttgaagcttgtgaagccacttgataccttctttatatccatcttgagtagttgaatatacaactttcttatcattagtcaccatataatgatctccattgtctcccaatccaaaagccccaagtataaatcctggatcctcatttccgccaacagcattaataataaatgacattggaattacatctgttttcccttcagggtgtttatctttaaatgcttttaagactgtaactaattcatcagttgtttttggtacttgaagacctaattcatcaagccattttttatttatccatggaatatctccaacagcttgaatagcttcctttccacttcctaattcctctatccatgggaatgaataaatatgaccatcaggtgcagtaatcattttcttatactctggtttttcttctagaacttttgataaatttggcatatattttgtgattaaatcttcaactggaataataactccttgttttgaataacgaagtaaatcattattgttcataccagcattaaatactacatctggaagtgtatctttttttgataatgctaaattctttttatcaggaaattgatcatctgtatagcacgtccaatctatatgcacatttgtttctttctctaatctttgaaaaataagtctttcattcgggtcttgagtcgaaattgatggcgcacttgtaagcatttttaaagtagctgtttcttttaatggaaatgaaacatcctttaatgtagctgtatctgttttcttgcttgagctaccacatgctgtaaatgataatactgttaacatagctaaagaaatactaaccaactttctaattttattttttctcatattatttccccatcctttttctatatatatttttttatcccttcactgatcctgccattattcccttatcaaaatacttttggaaaaatggatacataactaataaaggtaaacttgaaacaacaatcgtggagtattttagcaattgtgccattttagccattgctgctgcactttgaacatctgcaatcataccaggtcttggtgtattttgaattaagattgatctaattactaattgcagaggttgcaatttagtatcatctaaataaatcatagcatcaaagtaactattccattgagctacaaattgatataaaagtaatactgcaataattggtttacatactggaatcattattttaaagaaatgtgtaatatcacttgcaccatctatagcagatgcttctcttaactcttttggtaagctttgaaaataagttcttgccagtataatattccatacattaattgcacctggaagtaaaatcgcccacactgtgttaagaagctttagattgtcaactaaaagatatgttggcatcaaccctccgccaaaaaacatagtaataatatataaagtagtaataatttttttccccacaaaatctggtctagataatgggtatgcagctaaaagtgtggctccaactgaaattaccgcataagcagtagaatagaatacggaattcaaaaatcctcttaaaagcatatcgtctttaaatactcttgtatatccttctattgaccatttactaaaatcaaatgttattccttgattgtttaatgtattgggatccataaaagaagcaacaactatatatataagtggtataataatagctaatacaaaaagtattacgcctacataaccacttattgtaatagatttatcagaaaatgataattttttgaattttttcattttcatattcatcttatattccttctccctcgtttaattttttaacaattgaattcacaactattaataaaactatattaataactgaattaaacaaacctacggctgttgaaaaactataatctccatttagaagacccattttataaacataagttggtaaaatttctgaagttggtaaattcaaatctgtttgcaaagctaatgctttttcaaaacctacgctcataatatttcctgctgataaaataaattgaataaccataattggtttaattgctggtaaatcaacattcaaaatttgttgaaaaatattcgctccatctataacagctgcttctgttaattcttgacttgcatttgaaagagctgctgtataaataattgatgcccaaccagttgcctgccaaactgaactagctacatatatagtccgaaatgcactaggcattgccataaagtttgtagcagttccaaaaaattgattaactggcccaatcggtgataagaaaacgataatcatacctgaaattactattacagaaataaaattaggagcatacaaaattaattgaatctttttcttaattccctcactctttattcttgctaaaagtaaagcaagtataatcggtaacgggaatccccacaatattccatataaacttacctttaaagtattcattaacaaagtcataaaatctggggaagataaaaatctttcaaaatgttttaatcctacccactgactatggaaaactcccgaaatagcactataatcttcaaatgcaattagtactcctcccataggaatatacttaaaaataattaacagtattagtggcggtagcgtgaagaacagatataattgataattctttttgatatactttaacttactatgtattttagagttctttttattaataatagtatttccaccatctaatctgttaaaattaaatcttgtactttttaccccattcaaacttatttctcctttcattttattatttatttttttacatttgtaacaaaagctcaatttacctttacagatccactctgtttgccaaatcttttttgtaaaccttatctttaatttataaatagatattaccagattcttattacatttgtcaatataaatattacattttatcatcgtttcatttttacatttgcacacaaaatatattatatctctttttatttgctagtatttatgtatatataattattttattttacatttgtcacttcatttgttatactaatgtcaataacaatacttaaaatattgatatagattttatatgacaaagaaaggagcctttaataatgctaaataagaaaataacggttcaagatatagccgatgaattggggatttcaaggaatacagtttctaaagctttaaataatactggaacattagcagaaactacaaaatctaaaattattcaaaaggcaattgaaatgggttacaaacaatttgcatatgtaaacaatgtatcatccatttcccccaattcatctttaaataaagaaattgcactattaacaagcagtatgccaaacagttcccattttggatctcatcttttatcaggttttgaagaaaagatgagcactcttggctatagattatctatgtatgttgttcgtgataatgaattaaattcctcaagcttaccatcgaactttaaacctgagttggttgatggcataatatgcatagaaatgtttgataaaaattatagtgagcttatatgtggattagacattcctacactatttatcgattcacctagcacccacaacagtaaacctgtaaatgctgatattcttttaatggaaaatttccatagtacttataatattattaaaaccctaattaataataataaaacaaatatagggtttgtaggagatatatatcattgtgagagtttttacgaacgttggaagggttattgctctgctatattagattcaaaactctcatttgatattaataattctattatcgaaaatgacaaagaaccttatgatgatcctgaatggcttggaaacaagataatggacctttcggttcttcctcaagttcttgtatgcgcaaacgattttattgcaattaatgtcataagagctctaaaacataaaagtatttctgtacctgatgatattttaatatgtggatttgatgattcaatggaatcaaaaataattgaacctcatctcactaccgttagtattccaagttatgaaatgggagatattgccgcagatttgttactttcaagaatagataatccatctattccatttagaacaatccatgttcgtacttcacctaagtttagggaatctactggaaacttactgaatacaattaactattgaccaattaaaaataccctataaagataaacaatttgataaaagtctatctttatagggcactttgtatgtgtaataaaatacatagcatgtcaatttaacattctctttaaataatccctaaaagtaatatttcaataactaattagcccctagcacccaaggctcctgaatagtggtctttaaattattataagcattaatgagtgttcttagtgatgaatctaactgctcactttttagaactaaagcattataattgttttctgtcatcagtcctacctctacttgtgtctttgcatatttaagttttgtgttagttgactttattgtatcatttaagtcatttattttattttccaagtcaagcaacgttgaataagcttgccttaatccatttttcagactcttttttgaatcatcaagcttaacttgtgcttcctccactccatacttaccatctacatatgctccatacttagtaagatccagataatacttcaatgcatttttttcataatttataagttgaagagcataagaactaagtccaatagaataagcaccctcgtctaattcaactgctcctgtagcatcatcctttttcatatatgaagctggagatggaattccaccagatggcatgcttggaatatctttgttcataatatcctttacgccatcatcctttaagtcatctaaataatcctttgtaagattaattaatttctgattatattttaaataagtttcaattttatcatttatatattcatcacttgaaccatcaattttaaataaattatattctatattgggatctaaagtataatttgataaattcaaattagttaaaactcctaaataatccatgctgtcatttaatgaattttcttttgcagttatatcattttttaaagaattaatttcaatctgcttatccgttaattgatttgatgttgccatgcctatttgcacttttgttttaatagtttctaagtctttattttttatatctaaatttgtcttagcttgacttatatctatttgctttataataattgcattatacttattagtgatgtcgctagatatttgatcttgcaaaaaatctttcgactgatttgtttgtttttctagaagctcaagcttatcatatggaaaatcatatattttttctccaagactctcataaaagtcattagttttatcctgaatatcttctttctttctgtacatagatatttgctgagactttaaatttaaatcttcactattagttatagctgcatttataacctgatctaaagtaagaactggtttaccattaaatgattgtccatttattattgagtcactttcatcatttattatttgagcacttactacttcattatttttttgattctctattgctaagactggatttatacttccacttactatacttaatccaattccaatggcaaccatcctttttatattcttcttcatttattcttcccccttgtattaaatatctatataagtttctatcgatattttttcttcttcttcctttgatatcttcctatttccatatttactcagtgcaattctagcaaaatataatacaattcctattaaaaaccattctactgcatacattattccactttttatatatggtaatataacatcccatccaactgcttttaagtttatgaattttaatggaagtgctacattcataaatggccaaatatttttaattattctaggaagtccgctaggcattgcatactctgggaatggaattccactagctaaaaaggttactatatttatcatggtaaaaaattgagtaaaatatattaaattattaaataacgctgcaaataaaactccaatagctgtaagatcaataagaaatattgaagtcaacgtcaagtattctaagatatttccacgaagaggcagatcaaagtattttcctaaaatgcataaggcaattaagctggaaattactgatatgaaaataatcattaaaactcttgctaaaagaataagtatgtttttcacagtatcttttgatttaaaattgattaaagttaacttttctctactttttattaaagcaggtactaaaaatgtcataagaaaagtcccttgcagtaaatatggcacaagagagtacatcaaataccgtatatagctaagctgtggttcataaagaacacgctcactatatgaaaaagtcgtaatggctttctttgcattatatggcatcatatttttcccttcaaatactttaagttgaattccggcatttatagttcctgtgactccattacaatatgcatataaattgcttccaacaacaacatttgtttcatctattaatagtgcaacactaggagatttctttttgacaacatctttgttaaaatctttaggaatcaccattcccccactaacctttttctccttaattgcctgttgtaattcctcttgtgaatcagcataataactaatattcacacctggactctttttaagttcttctattatagttctggataaagatgagttatccatatctactattccgaaaggaatattttcaatatagactttgctgaaaatgcaagccacaaaaatcactatactaatgtgaagtaagctaagtgaaataatactttttttatctctagctagaaacttcagaaacctcatcttttttcctccttccaataactttatttagaattttatctttgatattagttcttttctttgaaatacttttaattagcagtataactaacataataatccatgtaaaaatcatatattttatcaaataatatagattaggcatgacatcattaaaatttaatcctaaaagagataggtctctcatcggaattccataatataagaaaggaatgattttagataattttttaaacacctcaggtgcagccattagtggaaatgtataccctgacagtaaaacaaaagatgaagccataaggctagagctactcactgcttccagtttattttttataattaatctaaataaaatccctaaatttatcatagtaatactaaaagttatagttaatgcaattgcagctttaactgatcctctatacggcatttgaaaatatttatattgtataaacatcaatagaaaaattgatattgaacctattaatccaaaaatgatacttttaattaacaagaaaaaatagttctcttcttcctttactactaatgcaccaagtgaaataattcctatctgagcaattccaattaacattccttgaagcaaaaaattagctgtgcttcttgctgaattccctaaaaatatggaatcagtttgtatgggaataatattatttttaatttcctgaggcattatcccaagtttaccttccccaaccttcattaaataactaactttaatagtccctaaaatttcagctattctagtcttacctgcacttactgctgacatctgggagccatcatagcaaatcataattttaggcgcttttccatcgtttaagtctttagcaaaatttgcaggaatgataataccaaccacgactttcccttcatccattaaatttttaatatcattatcattctcactataattaactacattaaatacttcattcgtatttatttgagtaataaaatttttactcaaagtagaatcatcatgatcaactatcattgtaggaacattttttactacatattcactatatgtataacccaaagcataactagaaatagctggtattatcaaaagtaacataacagaaactataatttctttagactttataaatctttctttaagcttcaatactatttccttcatacctattctcacatcactttccaaaatcaacaaaagcagtcattccagaacggagtggcttatcgttatcagtcaattcaactttaacaccataagatagtacatcaaattcaccattatcatttgttgctcttttaactgcaaaatcagcatctttattaattctaactactttccccttaaattcctcgtctttatatgctggaatctttacagaaacttcttgttctaagtctactttagataaatctgtttccctaacattacataatattgatggttcatcagttttagtaactacaataagctgcattcctgttgatataacttctcctgcttcaacattgacttgtgttattgtcccatcttctggtgcggtaactgtagcataattaagatttacattaactccttgaagtgctgcttctgcctgttttatttggccttcaactgcttcaactgatgcatttgcctgatcaacttgtgcctgagccgcctttatatcttctggtcttgcaccactttgtgctatatcatacttatcttttgctacctgcatttgagtttcagcattatcaaaatctgatttaggaattgaaccttgatcatacaaaacttttaatctatctacagttaccttggcaagatcataagcagacttagcttggtcaatttcttctggtcttgcaccattttgagctaactcaagctttgcacttgcagcatccctagctgcctgagcagcatttaactgagactttgctgtttcaatttgagcttgcacttgagcttgttgagctgccaatgtatcactatcaactataagcaaaacatctcctttttttacattatcaccttccttaactttgatttctttaacctttccgggaattagtgtatttacattaacatctgtcatgtcaacatttgactgcactattaaattactctgagcttgctttactagcttgtctccagttaatgtagatactggcgtgcatcctgtaaatatgttagctgcaaccattgaaaatactactaatgctacattttttactttcataaaattcctcctaaaatataatctagaaaactttattttctaaaatttaaacctcataagttgtatatttattgttgacttaattaggattaatacatatattgacattatattttttatgaattatcctttatatagacacatgtctattatagaaatatgtggattcttattcaataatcaatattaatggataagtctgttaataaactaaaatgataaatttgtctattaaatgggggattacaaatgacagataggcgtaaaagaaaaacacaacaagctgttcaaactgcttttgctaaattaatatcaaataaagatataaaagatattactataaaagaattatgtgaagaagcagacattaataaaagtacattttatttacattacagagatatttatgactgtgcagatagttttatgaattatgccgtcgataaaaccattaaagttatagaaccttatgattttaccgagttaataaatcacatgccagaaataattgaaaaaacattagatatatttagggaaaatagggatctttatgttccatttttcaattcaccaaggcactctttttctatgtataagacgaaacaacttataataaaaaagcttttagaaaaaactcaaaatgatgagaaatcaagacttgtaaataagagtagcatctcctttattgtatgtggactttttggtgttcttgaacaaatagaatttgatgaaataactcctgaaataacttcagtactaacatctaaaattcaaaatggatttattccttctaaagatacttactaatttaacgcagcatgttagtaaaccctaatgaactaaaataaatgagcaactgaaattaaattacaataaaaaaacagcctaaaacacactatattatgctttaggctgtttcctcgctatccatattcagtatttatagcaggctcttttatcttcatattcgtgtccattataagtttgctatttttgcaattcacaatgcacatttcataattaatgctaaatttttgaaatatgtttagaattataatgaagaattattcttgcaatatattaaaaaaaatcctcttttatcttcaattctgtaaataaaacattataaccactatcaatagggctacagcaatatatcccacatttaacatttttcttttgactgtgtagatgacaaattctaagttgtctccaacctttatttagaacattaacctctattttatagtcgtttccttgtctgctaattctaaattcagcttcatcaacttgtttatctaactcttgtgtagaccaatctgaatatcccaaattagttatgacagcaccaagttttggaggattatctaattcatattctatagaagtcttcagccaattatcctcatccactcttactgctaatccgcactggtcaaattgattgattggattaaacttaacctttgttgtcatagtaaagtccttttcgatttctatataaaacatatgagcattatcatttctaaagccataatgagtcctttgccaaaaatcagttaccttatcagtttccacgtaaattcccttttcttccactttccacactttaggttcatatagccacttcatcttatctactgacgaagaatcatttactaagtcaataaaaacctctgaatctttttctaatattttatcattttttattattatatctgccttcgccttagggttatctattgaaaaatgctgtctttgaagccacataaaataatctccataaagatcttttttatcttcatcacttctttctatggacgatgtaaaagtacaatccaaccatactcttatatcaaaattaatatctacagtattcttaaatattaatgctccctcaactataactatatcattgcttttacatgcattttcaatttcattttttattgaagaaaaatcataagcattttcatagtaatacttagatggattaatattactaagagattcttttaatacatcttgattctcctctaaagaaattgtataaacattatattggccttggtatctttcttttaatttattagcgaaagtagtttttccacttaaacttataccgctaataccaattaacgccctcgaattttctttcactttttcatttattaaagaatataatttttccataattaatacatcaactccctcagtaatatttcttattatcttttagcatatgaaataaaataatagattaaatatggaatgcatatttcgtatcagacagatatgcaaattctgcttatagccgatttactagaggaatttactgtctcagcatgatgcaaaatatgcaagcatactagtctagtattttttagttgtaccttaatgtagctttataataactaattatactacataattattttcgttaactttgacacacatattagttttttcagagcttattagcattatcaaaatatatgctatcaaaaaatatggataaatcactatactagtttttgaagcagtaaaccccaatagcggaggcataaatgtagttccaatataggcaaatgctatctgtaaccccataatagcctgagatgcagctttcccaaaacgccttggagtttcatgcatcattgatggataaataggagcatatccaactccaattaaaatcaatgctgctattgaaagataaataggaagtggtaataacagcaaaactgctcctataaagcaaagaatttgcccagctcttattaaaaatagattattgaatttcattgttaaaaatcctgatagaaatcttcctaaagtaatccctgcataaaataacgaaatagcacctgctgcctgtgcagcatctactcctctataattaaccaagtaactgcttccccaaaggcctgtactagcctcaaccccacaataacaaagaaatgtcagcagtgaaaattttacacctggtaattttagcacagaagtattgttgtgttcctctttttcttccttatctccctgtatttcactagatggatttgtcccttcaacctttttccacaatggaagcgtaaaaaacaggacgaaaactagaaagaattgaagtattgaaattgcaaggtatccttttcgccatccgtaattattagcaatggaaattgacataattataggtcctgtagtagcaccaatcccccaaaaacaatgaagccagctcatatgctttgccttacagtgcaaagctacaaagttattaagtgctgcatccacagagccagctccaagtccaagaggtatagccataacacatatccacagcattgacgggcatatcgaaaatcccatcaatgccacagctgtcatcccaacacttacaagtgtaattttgccagtatcgaagcgtttaataattttaccactaaacaaactggatattattgttgccgcagagacaatcattgaaatgactcccgctgaagaaagtgaaactgacaaatcattatacataagcggccatgctgatcctaatacagaatctggtaatcccaaacttataaatgataagtatacaataattaataatgctgtaaacattcttactatttcctctctatcttattttttataattttcatataatcctaataggttgtatcaaagtctattattataaagaatctgaaaagattacctattctaaaacttttaattcattatgttattaaaaaactctacatcacgtaaatcagaaataacttttttagcctgattatatttctgggaggttgaaaggttatgaggccaagcataaacatctctaattcctgctgaaacggcggcacttatacctatatcagaatcttctaatactataacttcgtctgcttttaaattaagcatattaagcattgtaagatacggtaatggatgcggcttagatttttctacgctttctaacgcaacaataggcaccttttttttatcacctattcctaataggttaacatttgcttgacatattttcatctctgcggtggagacacaaccaaattttatatttttttttattagtgacatccatagttttttcatatcttttctaattagcttttcacttaatttctcaatatagtattttagagtagcatcctttattccttgatttttactatcttctattccaaactttctaatagtttcatcaagagttaatcctattaactcatcttccttaacctcgatgctatcacatacctctttttttattgattcaattaaggcttccatatgcaatggttcactatcaacaattattccatctatatcaaatattacaccttttatcatatcaatttttctctactagcattctattataacttttgcattcttttctttaggctgaaccattgacttagaatcaatatcacaacctaaaattgaaaatgctttcttataattttctaatggaattacatgacttactaacttttcagctggaatgatattctttgtaataagatggaaagcatctaaaaatgaaccgtgtaaagaatcaattgatccaattattgataaactcttatcggctaattccctgacatttatatttgcatacttatcttttaggccaatgctcatatatgttccgtcacaagacatttcaggatataatttttctaataatccagatgtagtatctactacgatatctaatggtgcctttggatcattaaaataatttgttcttgcttcttcaagtgaactatatatattcactccttgcggaacgcaatcgcttgcataattgagtctatttaaggatgtttcaattactactggagttaatccctttaagtgcagagcccatgtatataaaattcccattgttccagcaccaaatacatatgtatttaaattcatggatgaaggctgaattttacgtgctcctgtaattacacagcttaatggttctgttagagttacagctttcatagatacaccatctggaattttatatacaaaatctgatgtagtgcgataacgatctgcataagtaccatcataacttacaccactttctgtcccaaatttgttttcacagtgatttatccttaaagtttggcacatacgacatttaccacaataataagttggatttattactactctgtcacctacttttacattttttacttctgatcctacttctgctataataccagttgattcatgtcctagtgtgacgccttttactgctacaggataagttcctgcaatgataccaacatcagtaccacatattccacaatattttatatcgactataacatcatttggattgataatatgaagatcgtctacttcttcaagtgaaacatcccatgtcccattatattttaaagcacgcatttttctctctccttgctaaattgaattaatgaagattcaagtctatctaaaatttcatatatttcagattcatttactattaatggcggtctaacctttattgataggccaaagctataacgactggctctaacaattaccccttgtttctttgcaatttccataaatagatctacacttttcctatttgcaaaatcaaatgcaaacatcaatcccatgcctttaacattaaaaataaatgggtacttctttgcaagattttcaagcccctcttttaatattttagattgcttattaacattatctaaaatattatgatttttgatatacttaattgttgcttccattgccacaagtgctaatggatttgctcccgatgtcgttgaatgttcccaagattccaaaacattaagttcctttctcatcagaacaccggcaacaggtattccaattccgcctgcaccttttgcaaatgttattatatcaggtcttaaatcttcagcaaaaccatttgtagcaaagaacgttccagtcctgccaaatccagtttgaacttcatccgctatgatcaaaataccatgcttatcacaaatttctcttatccttttgaaatatctagggtctggaactatatttcctccattacctagaatgggttctataataaatgcagccacctggccatttgaagcatattctataaaatcttccattctccttgcacatagaaatccgcaattttcttttgattgtgaataaaagcaattaaaacaatcaggagctggtatttttaaagtatttggctgagataatgaaaaattttttctgcgaaaagcatttcctgaaactgctgttgttaagacactttgtccatgatgtgaaagaaataaagatataacatctgattttcctgttgccttctgagcaattctaatagcacattcattcgctgttgagccaattatatctctaaaccaaaaatcgtcaatttgttctggtaaaaattctcttaatgattcgaaaatctctcttgatttttctttggtaaaggctgatgaaagatggctgcatctcatcaactgccttcttacagcttcaacaacttcttctgctgaatagccgagagctaaattaaaagtgcctgatgcacaatcaatgtacttttgtccatcaatataaagatagacgccttgtccaaagtatttttctaaagcatctttctcttctttgtcaacctctttgggatcaaactttgagttctccattattcttttttctctcccttcaaatttaaattcttcctacttatttctatttttctacatacatcatcccctttttcttatttttaccacttgagtggaattatatgttagctaactgagacaattttacaatttaatttcatatatgtcaacagttaccatgttatcttttatatattattgtatatttttatatttttagttcttaaagtaatatatttaatttgttaaagtactttattagtctattattatttaaggattatgccgaaaaatctaatataaaatataaaatcattaaaattcaaaatagcaaaaattctaatatacttctattcccctcctaaataaatactttaaatatgaactaaaattataaggaatttattacactattttgctcaataccaattcataatttaatcttaaattgatccgccgcactttttttaggcaacattgccataaatgtatttctgaacttcttaattagaatataaaattaattctttcatataacttgacaaaataagtaattaatattataagtatatatataataaatatacttataataaatatatatattaaaggagaggttaaaatggagttaacatttaaattagaagtgaatgcacctaaggagattatttggtcttattatgctgatcttgaaaaaagacatatttgggaagaggatttagaagatattaaatttaatggaaaattaaagacaggaactactggaacaatgaaactagagggaatgccagagatgtcttttactcttactaatatcgttcctaattgttcttattgggataagactgatgtccctggtgttggaggcatatattttggacatgacatattgcaaaaagatggtaaaactttcattcaacatactgtgagattagataaagaaaacccaacagaagatgatttaaattttctttgtaacgtattttctgatgtccctaaatctactatgataatcaaaaaggaggctgaaagataaattggagtttccatcaaatcgctttaaagatgatgcagaatcatcaactggacttctttttattcgtgtatataataaatggcattctattataaatcaagaattacgtaaattagggatcactcatcctcaatttgtagtgcttactgccttaaactttctcagccaatctgatgataatattactcaagtaagtatttctaagatggcagatatggatgtcatgtcagtatcacaaatcgttaagggattagaaaagaaggattttataagaaaaactgtaaatccgaaagatagtagagcaaatgcaattatactattaccaaaaggacaagaaatagtaaaacttgctcttcctgttgttgaaaaaatagatgatgatttttttggtattttacaggaaaatgaaaaactctttcgtaagtatctaaatcaactggattaatatatatttagaggtatgataccaaaataaataatggatagatcacaaaatatctatccatctttatacatttaaatatgttatacattaagtataatttttatatggaaaactggcttttgtgctgaattaaatagactacttagtaagaactttaaatagttaaaagctctcttccaagagttctgtcatatatatatttttttatcatttatttgcaccaaatgccatgtcactgaatattccattcttcttttaaaaccgcatatattacatcatcagcccactcattattaaaccaaaaactttttttaaaatgtgcctcttttctcattccaattctctcaagcaaagtaatagactttttattttgaggatcaaccgatgccgttattctatgtttatttaaaacattaaacaagtaatttatcacacctgttactgcttcagtagcataacctcttccttgatatttttcagataatgtatatccaatttcaacttgcacattatcttcatcacaaaaatgaataccaacatctcctatgaactcattagtttctttaattataattccaagctggtgccacgtatctggtatattggaaattcttgataccttttcagaaataaattcctctacttctttaagcaacttaggcctccaagtttgaaatttacctacttcttcacttgaacgatattcaaaaattgattcagcatctaaaggcgtaatacaccttaattctaatctttccgttaaaatatttatttcacttgcattcattactttttcctccactagcattctgtgtattttgtttagtgttaccttcatatggtaactataacatacttgaataatcattgttagttacatgacattttacttttcaactttttccctacaaaatcaataattaatcgtagtataactccaaataatttttttaaaggatttatctttacatcgtaaaaataatatgaatttaaccacttcttgtcattccaataatcatgatcagccttcgaagtaaaagtcttagttcgtaaacaattaaacataaatatatcataataagatggagcttttctaacttgacttttaatagcttctttaaatttattcgtaagtttctcaatttttaaatatgtctttttatgataaccttcattgtaaactaaagcaaaattatcttttctattttcaaaatacataggcgaaataatacttattgttccaattaaattacatgcccaaccactaatagtcatcttcatatatttgccaacctgcttatggccacctccatcactggtaaccataatcaatgtaggctttcccactaattcttgacgatggaataaaaatgccattctatcaataattctttttaatggtgctggaacctgatatgcataaacaggtgtagcaataataattccgtcagcctctaagagcttttttcttattatatctaaatcatccctgcaaggacaaagtttttcactcttcttaaaacataacccacaacctctacaatcttggattttataatcctttaagaaaatataatcataagtcatgttcttagttcctaacctcaattcaatttccttacatacatttaaactgtcctgttttcttggacttcccattaatataactattctcattttattcctccacatgctatccaatattggatataaagtttaataatatatcctatcaaaaaaagataggatgtattattatttacttaattttttaattaactcttctaatttttctgacgcattttccggattttttaagatttcttgttttagactttctatcgaatcatttgttgaagcctccatttcttcagcattagaaaaatcaaaatttgaaataaggcttgagatttcattacttgtagcaatgcattcatcaatctcatcaataagtgcttcatgccattttatttggtattcaagatttgaaatcattatctcgaatgaaattttttcaaccgcaagactttgcttattgacttttatcttctgccacttttttaaatatgttatcttatctcttaacccactgatatgggtatgtataagagaaatcatactttgtttatctagtgtatttaacaatggataaataataaatttatccgaaccgcttgggtacaattcattagttatttcattttttacaagttcttttaattcatctctgcccttatcagttattttataaatttttctagcttttgatccagaaccaatttcttcttttaaaacaattaacttatctttttctagcttatttaatgcataatatattgatcccgattgaatctttgtccacttatccatatggtttgtctggatgaatttttgaatttcatatccatgagtagattttatgcttaaatagtataaaattaataccttaattatgtttctcacctctttatccaatattggccataatttatggtatacccaatattgtataaagtcaaatgtttttatttataatatttctcctctctcattatcttaaactttattttatattaaactctctaccatactgtcccttttggaattatcttcatgaggcatctttcattacccatttttatacttttcagtagctcaacatcaacttcacacttaaaggcttcttcgaataatactttactatacccagtagtacattggcaccatgtatcagactctaacctatctacatccgcaagcattgggcatagacaaaaattaaactgtaaataaagttctccattctcataaaatagccctatatcttttgctttctgtaaatttccgaattcttctaaacttgatgatagttccattagctctttcacaagttctaacttcttatccattccatatccacactggcacttcattctaatcttcttaataatcaccctatcaaatttgctttctaatctcttcattgtagcatttacccatatggcattgctttctaatttaccacttccctcttttccatatacaacctctcttgcaatctcctcattgctttggcccttaacggcttcataaataacattctcttggattttccttatatcaaacataaaattccccttttcttgactttatctagcgataactttaatcacatgaaagaaaataacaattctaaaatttcatgattattttttgaatatgtcttatcactatttttataataagggaaaccttatttttttacttctgaattcttgctctatttaatagcaacacataagtccatattaacatgactattttttctatcaatactatggtaaatccctaatgcatatctttcgtctcttctatacccactacgtggaagccaaacattaaagattcccaggaatgttataaaaatatcatatatatatccactaaatctataaactgcaaatttaccaccttttattgttgtaagagtttctgactgtacatgttcatcgacagtgatacataaatcatatatacatttgtctaattgagtaatagatggatcattataagatttttcaatcaaaagcgtatctggtttaatataatctttataccgttccataaaactataccaattaacacctatctcactataatctccaatatatctttcataaatcactttaaaatcattcaaattttctataataatgtgcccatcataatgctcaaaagatttaaagtaattatattcactaggacaaaatggattaacaacacctgttgaattcatagattttctaaattctactggacaaatactatattgcttactaaaggctgaactataattggaagaactgtatccataattaattccaatatcagtaatagttttgtctttttcaaccttaagacttactgcactctgatccatttttacacgtttaataaaggaatataaacttattcctgtttctgctttaaacattctagtaaaatgatattttgaaaagttacagtaattggcaacatcttcaatagaaatctcctcatctatatgctgcaaaatgtattcaatgcttttatttatcaaagattttttaattatcactttaaggccctctcccaaatactttttacgtaaactaaaaatttcgttttgataaaagtttactttcattataaagaaatattactgaaatgctgattttcaataacaacattaaatagaaaatataaatttcatcaagcgctattttcatatttatcttatatttaaaatacctctcacttctctaaattataacatattttgtaaagacaacatcacttataacaccttgctttcacttataaaaatagaatatctggttttcagatatcctatttagaattatattttaatcacctttcttatttatactttattttaaatcaactgtaacaatcttatcttcaattatatattttgttctaccaacttctgaaacagatgtggtatttgtatttattttgttaaaagtatacggaataatctttattgtatttacattggcatcctttactggcaactcatttccatgatgtgtataaaaatatgcaccttttcctatttcttcttttaaaggcactgaatcaccatttgcatcaacaatatcataatagtaatttgcatctttattatcttcccatgcactaaaaccttttgaagtaccagaaataagcattctgtccggtgtaatagtaacgctgtctaatgaaagctcattatcaccaattgtaatatttttacctaccttaacaactttagtatcgttcttataactagtggcatcataaacaaaggtataggtaaaatccgaagaactaacaccatattcttcagccaaagaagaaaatactaactttacatcctccttatcacttaatggcaattccttcatttctacctcaagaattacattattttctttctcaagttcattattttctaccttatcgtatccagcaaaatccttatatcctgcaatactatatccaacataattcgaacttctctcaatctttttgccgttgatatagatatcaggtactaacttgtctttattatcaacaagatcatcttttttctcattaatattaaaattaataatgatccttgaattatcagtaaaaaactcatttaaagtaagattaatatctttcccctccaaagttttccctatttcagttgaatacttttctccagtagtattaatacctaaccatgtattaatactatatctaaagtttgctactgctgctaaaactttatcaccatgaatgcctaaatttacaatcaaaagcaaggctgctatagctgctaaagccttctttttattccaaatcacctttttatttttagattttataaattttttcatcattttattcttttctaattcattaacctcttctactacatactgtgaaaaatctatttctacattatttaataaactatattcatctttcatggcttatccctccttatggtttagaaaatatacttctaagcttactctttcctctagaaattctgttatataacacagagggtttaatattaaactcttcactaacatcctttatagattcttctttcacaaaaagcttaataaaaagctgcttatcaaataaactaaggtattttaagatttcctctgtttcatattctaattcgttctttaaagcctctttttctattgtgaagtcactttctatatctagttcagatatatccatatgctcaagagtttttaaatattttctcttataatctatagctctgtactttgctattgcggctatccaattttttaaaatattcttttctttatcaaagcttgtgatattattccatattttaagatatacatcattaatgcattcctcatgatactgtggaaaattgtataaatgtttctttactatagcttttattaatggtgcatattcattaataagtaactccatgcctttttcacttcttttttttattaatgaatagatttctttatccatagcaaaatccccctttctgacaatgccttacacttactattacggataggctaatcctaattctatcaatgagtaaatttttttatttttttgtgccttatatataagtactttcataataaaaataaatctattaaatgataactcccaatatctctatgcaaattgcatacattccttataactccaagagatatttaaaaatttatattatttctatccaatctataaaaatgctaatattatacctttaattctatcatcataagacaatatattatccagattttaagctcaaaaaaatagtagcccccatttgcaatttggatagctaccatttttaataaaaaacagttatttttgtttaaacttacttatcatcatttatttgcgatatgattctccgtaactacttcaagtgaagtttttccattttattcttatgcaatttctatccagtgacttaagatattatctattacaaatcctcttttcaaatacatatttaaagcaattgagtttttttcaataacatttaatgtaaccttatctacattaactgcatttaaggtgtatatagcagtttctaataatctcttgccataacctacacctctaaactcattacacaagccaatatcaaagctcccaaccttattctctatctctatattcataaatcctattaatttgtttttatctctaactaaataatatctattttcactattatcatttaaatatttctctatatcctccatttcgtaatagcaaccatggggcatatcactaaatgatttattaaaaacattaagatactcttccttatttttcgctgatagattaattaactctaagggttcactagttgttttcctattttcaagtttcattttataggaattataacttgaaatatatcccaactcattaagtagctttaaaattttctcattccctactcctaataaaattttgctgccccccttacatttaccaatattaatggcagatgtaagaagctcacttacaatatgaacctcattctctgcattattagctacagttaagaaatgaatatatactactcttaaatgccttatagcttctagaataacttttactgaacctactaccttattatccttaaaaaaaaataatattccctcaccaaaattataaacctttgtgttaaattcctcttttatttgtggtatagatttatcatttttttctaagctatttaaatataattttacctctcttatttcatccccatttaaatttctaaactcttttatcacctcagcccactcctattccttaacccagtacttagtgcaatcattgcttctatctataaatccatactcaattaaagctcttcttatggttgcatagtcctcaaaaatcctttttaatactctatttatttctttctcagtataaatcctacccgtagagaagtttttgactatttcccctaaaactataatcttcttcttttccttagctgggtaggattttaaagcatttgtttcatccatatatgccttaatagttacttctctttccttatcagtaatgttatatctatcatctaaggttgtcgcagttttgtgaggatctgttataacttccttatctaaaacatttatctcctttgatgctgtatcacttaaaagctccattacagctaaaaatagtctagcttgcttttccttttcccttagcttaaatctatggtttctaatagtcgattgtgctatgccaagctttgttgctatctccttgtctgaaaacccttgagccattaattttattagttctctatgaatctcagatattcctgtaaagtctgaattcatatttaataaataacctaaggaagaattatgcacttctttaatatgaatttcagttattttttttgcatcataaaaatcctcttctctcttaaatattctccccttttcaaagctgctattgcaaaatatacaagtaaactcttctgctctttcaatgtaaccttttttaatctcatctatagatgactcccataaaatttcatttcccttcattactctcactccaattccaaagttttctaattatattttatataacattttcacttttgtctatatataattaaacatttttaatatttgtttgcatttttctaaaatcacacttaaataccgtaatatatttaaatttacgcttaaaagtcttgctagtgctgttaatatagttatatatgaataacaactacccttttcccatttattaaatgctaatgtttatatactcagataatcagcaacttttttttgaggtaaccccttgagcgttttttctctttataattataagttgaatttaattattacttatgatacggtattttgtttataaaaatagccttaggcaatttatatcaatgcctaaggctataaaccgtatttacttatggtacggtgaacggtatcataagtaaagaatcgagctttttattatatggcttctcttactatataatttacaactctcaaaaattgatataaatagagtccttaagccgttttatatcacttataggtggtaatccaaacattcgcgcatactcacgactaaattgagacgggctttcataaccaaccttataacctgcctctgctgcttctaatacttctgaaagcagaagtctccttgcttcttgtaatctaatctgcttttgatattgtagcggactcattgcagtaaccttcttaaagcaatgatgcaacgatgaagaactcatattaatttcctttgctaattcatcaatccgcagcggtttctcaaaattattattaatcaagttaatagcttttgagatagcccgtgcatggctacctatcatagcaaattgcttcaatatgtatccgtgtttatcttgtaaaactctataaagtatttctctaatgaataaaggagcaagaactggaatttcctctgtagtttctaagaggcttacaagtcttagcaatgcatcaagaagtaatgaattaccttttgttacagttaatcctctttccaatccaggcttttcttcaaaatcttgttttgattctttaataatatcaagaatttgatctgaattaaaactaagcctgacacataaatatggctggtcaggagtggcttcaattattttacctataataggcaaattaacagatgcaactaaataagagcttgcatcatatctataactttcttttcctagaattacagttttcgcaccttgtacaattacgcatatggatgggatgtaaatcgaatgcagtggttctgaaatattagaggcacgtattaaatccaatgatggtatatcagttgattgaaatccatctctataagtaaatttctcaactagagaagccagacgcctttgctgactacataatttataattttttatattgtaaatccttttttccataataatatctcctcataaaaaaattataatttcttttgcaggattgtgcaatgattaggaataaataggctacctattcatatctaaattatcctataatcaaatcaataaataaagaatatgcaagacaaaaatatttactcaatgtaaatactctcatatctctttaattataagtaaattattttaatggaggtttatatcaatgagaaacttagaaggtaaagttgcaataataacaggtgcatctagaggaataggaagtgctatagctagacaattatctgcacttggagctaaagtagttgtcaattattctaataatgcagtaaaagcagaagaagttgtagaagaaataactaaatcaggtgagcaagccgttgcaattaaagctgatgttagtaatataaaagacgttgaaaaattattttcagaaacaataactaaatttggaagggtagatatattaataaataatgcaggcgtaatactttataaattactttctgacgtaacagaagaagaatttgataagctttttaatataaatgtaaagggtacttattttgcatgccagcaagctatgaaacatatggagaataacggaagaatcattaatttttcaacctcagtggttggaagtatgtttcctacttatagcgtttatgcagccacaaaaggagcagttgaacaaatcacacgccaattagcaaaggaatttggtcctaaaaaaattacaattaatgctgtagctcctggtccaataaataccgaacttttcaacgttggaaagacagatgagcagatagaagcaattagacaaatgaattcttttggacgtattggtgaaccagatgatatagcaaataccattgaatttttggttagtgataaggctcaatggataacaggtcaaactcttcgaattaatggtggatatgtttaatactctcatctataaaaaaaacaaagttttttagccaatatcccctaaacccgcattattccagcatattctgaagaatatatattctaatattcttcagaataaatatggcttagaatatatattcttcacaatatttatggtaaagaatattagaatacactagttatatacagcaaatagaggctgttacatttgaacagcctcttccctgctcccatttagaagctgcttggcggcttactccaactatttctgctagcttctcttgtgaaatatttctttcttgcctaattaattttaaattatctgaaaaactcatgacttcatacctcttttctttgttattatgtacaaattataatgatttttacacaaaaataacaccaacctgtaattgcaaatccgcaacttgtatttgcattgctcataaactgtataaaaaacttaattatgaattactccttattaaaattatttcattatataaaaataatcacactaccaacctgaaattttaatagtgtgatactttaatcgaatatttactttttattacttataagtcattatatatttctttaatagatttaaatttaaaactccagaaaaacaatttcctaattagagctagatttcaatatattaaatgttaatatatttattactcccaactttcgtaatgaaccatatcttcaagcttctttcttggacgagctttaggagtttcatctggatatccaatagttaagactccaactacatatttgtctgatggtatatttaatactggtctaatttcttcctgtgtgaattctgcaacccagcaaacgcctagtcccaagctattagcttccaatagcatataccctgttgaaattgaagtatctctaattattctttttaattcatcctgaggactgttatcatctaaatacacatccccttctttaattctgcaacgtatatctgcaacacatacaataaatactggagctgtaaacatccatttttgattatgagaagcctctactattttttgtctcatttcttcagatttcactactatgtagtgccaaggttgcgtgttattacctgatggagcaagccttgcactttcaagcaattcatttattttttcatcttctactggtttattactatattttcttatgcttctacgcacttcaatttctttaatcatctatatgaatccctctcttcatggaattttagtacattttacacataattataacatattcaatagaacactactctttattttagaatgatatcttttctaaataactactttataatgctataaatatatgaatcatgatatgtaccatgatgataacgatattttctcaatgtaccttctcttagaaatcctgctttttgcaataccttttgagcaatgatattttccacatcagtatcagcttctatccttactattgggtaattctcaaatatatactttactattaaattaagtataactgttccatttcctttgttacaattatcagaacttaaaactaagccaattctcacaattccttgtctataaaaacttaagtaaagcaatccaattgtttgctcttctttttctacattcagtatttgaaactcagaggagcaaaaaccatctttctcatattcaagttgtagttttcgaaatgattcaaattgaaattcttgataatttccacgtgccttttgtgaattaaattcataaattacttttaaatcacgttcctcaatagttcttatattaatatctccttctgtaatcatttttcatactcctccagtatacatctttaaaataatttaaattgttccttctaaaaatatcttcaaactacaaacatcattaaatatatgatttggattaatctttttcagctcttctaagccaacaccatttgaccacgctgctgatagacacgttacacttacttctctacaggcaactacatcagagagtgcatcacctacatagcaaaattcatccttattaatacaatatctttttaacagctttataatattattgtactccattaattttcctaatcactctacatggatttccaaccgctacactattttcaggaatatcctttgttactacactacctgcccctataacacttccatttccaatattaactccaggtaaaataataactccgcctccaatccaacatccatcgcctatagtaataggaagtgcgtaagtattgcaaaaatattccccagtttctgaatcccaattttctactaatcggtcctctagctctatcggatgagttgctgtataaatttgcacattagatgcaattagtacattattgcctataataattttattgcaatctacaaaagtacaattcatattaacagatacattattaccaatatagatattgcggccataatcacatataaatggagatccgaccgatacattactccttattctaccaaaaaggttccctaaaacttccctcttttcttccttatcctcatagctaagactattatattttgaaagtaatcttcttgctgtctttttaaaccctaaaaaaatttcatcatgacagttataattctctccggccatacatttttctaattctgttttcatattataatgctccttttttcgtaattgcttttatcaatagtataagaaacatcttgttacatatctagtaacaagatgtttcaaaattcatattcttcttgccaatgcttctataagaaataacactggcacttgtgtagtagcattatatccgccattagcttgatgcatgtccatattgtatgaaatattccagtctgacatcttagcaatagtcgaattggactgattcgttatactcaaaataatacatttactaactttgaattgatttattaagtctataacgccctttgtttccccggaaactgaaagtgcaattaccactgtagtcttcatatccttcgtaattggataaaatgtatcttccaatcccattgaaaatttccccaagttagagaaatatcttgccccatattttgcaagtgcaccagatgaacctgaacctaaaaataacactgtttctgattttctaatcacctctccaccttgctctattttctgctcaaaggaattaatgttagttttcttaaagtaatttaacatctcagtcaaatcactttgtggtggtatttcctgcattctatgtacatatttttcaagtctttctttgaatttcttatacccatcacaatctaacttattgcagaatctaataatcgtcgatgttgatacctgaattgcactagctaattctcgaatagtcatataatgtattttttcttcattatcaataataaacttatatatcttgatttcagtttcattaaatctttgaatattatcatacgaaaacattgtctcctccaacaaagttactatttatcttttaattaccttaagattacgatacacttcttgcctttacatttcaaactccaggtaaattaacactcgtgaacactaatgcttccttctttgaatgcaagatattctgaactagcatcgattgtgtagatataatattctccaggctcatctgctgttatttcataacttcctgataaatctttaaacttttctccttttaccattttcccatttactacatggccgattactgctgtttgattcttcgttgcttttgattgatatttatcaaaattaaatactaatgaatctcctttatttagtttacaaccgctaccatcatccttcgtaaatacacctatactgccatttgtctctattatctctggagttatatattcattgtttttttcttttgttacaaagtcactaatcaaagctgaatccactagattcatttcatcaggtatattttttatagttttactatatctcaacatgttatgttcatcatattcttctacctgcccttttccctctacaacttccgtcccaactaagtgcttattcttttctgtaatgtacgcggcaccctttagtgcatatttattatattgtgtattgtgataaaaaattaaaaaagctataatgcaacaaactaaaacactacaaaatgcaataatttttcttttcataatatcttcacatctttccacataatatatgtaaattataacacatttttgtaattaaagtgttctgtgattccttgaaaatatttacacttgcactagctatattttgcaaatttaatgatattttgctatttagaaatgacagaacaattatatttgtactcaacccctaaccctttatttctataaaatttaaatttctaattattaaccaaaactaaaaatgctaataataaaatagctaaaattgttccaatcaacgcaataatatttatgattttatttgctttaaactctgttttcaataatttgaggaaaacaccataaatcgtaattccaacgattcctccaaaggtatttcctataatatcagttatatctgatgcacctattgcgaatgtgaattgtaacacctcgtatatcagacttactcctgctatcaaagctgcttttttcacgaaataccatttacgctttatcatatcaatgtagattccaaacggcacaaatataagtatgttatcatatatttccgaaaattcaatcctaccatttactattacagattcatgaaatggaattatgttaatacttcgaaagtatcctaattccttaagtgagaattgcatcttaaataatataatccatgttaacactactaaatatactaaaagtaagcgaattgttagtgcctcttgctttgtttttttattttccatatgtatttcccatctcccttaatacttttacaaaaattattattaatattccaataataatgctacagctaaatttttttattctaaatttaattaagcacttattctactgaaatattaactgcaagtttattatcacatcatataccacttactatttctagtatatccgtataatattaactatttatgagtataaaattaaaaataccttaatatttcgataattagttgcacacatcattctattattcaaaaaacatagctttatcttcaagtaattttatatttcatctaactttaattaacgaaaccctatgacttataaaataaaaaaatcccatcatcatcttgaataatgggatttttctgtttatttttcattacattatataacaatacttattgtagccttagctatcgcttccactatattatagttacattgtctaacttagctttgaagccttttaagattgcataagtaagtttatccatagttgcaccatcaaaaatagctttcttaacttctgtcttaaaggaaacatttcttaatattgcattcttaaaacttgttcctctaagtcctgagtaatcaaatattgtaccatttagcttctgaccatcaaaacataatcctgatagatctgagtaactaaaatctgtattatctaaaattgtatctttaaagcttgctccctttagacttgctttatttatttttgcaccacttaaattagcaccatcaaaattagcattgcttaaatcactacatttaaatgaactatctcttaagttagaattactaaaattggcattcttaagagcactatagttaaactttccattaactatctctacgcctttaaaatctgaatcttccaaaggactcttggaaaaatcaataccaacaagttgttgtaactctctagtttttgaagtaatactttctacaatttctgatacctctccaatagattcaatggttttattatatgcttcatcttcatcatatccattattttttaaatcatttaatttctcttgcagatcaataaataactcttcttttatttctttaactgccattaaatcattatatggagtaaatatataatccaagtgctttcttaatttttcactcatcttaatttcacctcttaaattaaattatctaatattttctttgcattttcccaattcttcttattttcaatatataattctttacctttatcagtaattttataatattttcttcgtccaccttgagtttcttcaccccaataagacattacacatgcttctgattctaatcttttaagactagaatacatggttgcttctttaagttcatattcaccattagaagccgaatgcacagttctagatatttcataaccatacttatcgcctccaagcaaaagttttaggataattgtatctatatgccccctcactagatcagaggatattttagaattaagcaatatactcacctccttgaatacaatatataacacattactttgtctgtcaaggtaatattgcagacatacaaaagaattctacttaaatccaaattaaaattatatgtacaaaactctcagtaacactcacttcttcacttttttattgcttatttaataaaatatattttttcattccttcaccacttttattcttccttcatcgtatccaaatcccgccactcttcaccaaatacaactttttcaatataaatttaattaattatcaaaaatttaaacttattctttaaatatgtattaacatgataaaagactaaattatgtgcctgcatggtgcattttggcatgtttatcaattaagttttgattagatttccaatatttctatataatcaacttgacattataaataaaaatagtataattaccctgggtaatagttaaccatggtaactatatattttcgggagggtataatatgcaaggactatttcaacgctttttttcactacatcgacctcttataagtaagctaaatgaattactaggtgaatatgatctttcttattcattatggcaggttattctatatctaaaaaataaccaaccatcttccctagtagatattgctaactactataatatcgaaaagcctagcataacacgaagagttcaacgtttagaagaacggctaatagtaaaaacaatatctggtaaagatagacgtgaaaaaataattgagctaactgaaatcggtgaaaaactttatgatgtatgccgtgaaagaataactcaattagaaaatgacgtggtaaagggtatttcagaagatgatcaaatcataacatttgagacacttcctaaaatacaaaaaaacattacgaatgaaaaggagatataaaaaatggataaacctaaattatggacaaaaaatttcttaattgtttcgacggcaaacttttttctttattttacattttatttattgatggttactataaccacatttgcaacagaaagatttcatgcatcaccaagtgaggctggattagcttctggtatatttgtaataggagtacttctttcacgtattttctctggaagatatattgatcaagttggatggaagaaaatgctttatatcggatttattttatttttagctactacatttttatattttttagtgaatagtatggtattcttattcattaatcgtttcttaaatggtgctgcaatgggaattgcttcaacagcaactggaactattgtagcaaagataattccaaatgaacgccgtggagaaggtactgggtattatgcattaagtcttactattgctgctgcaattggaccttttttaggcatgtttattactgagcattcaaacttttatatgaattttgttgtatgtattattttcttaatacttagtttttttgctgtcttttttataaaaattccaaagttagaaattgtaaaaggacattcaaataataataaagatttttctttgcataatttctttgaaataaaagctattcctatttcaattattgctggagtaattgctcttggttattcaagcatccttacttttataagctcttattctaaagaaattaatttaatgagcgttggaagtctcttctttatcgtttatgcggtatttgttttactttcaagaccttttactggacaaatgtttgataaaaaaggtgagaattttgttatgtatccagcaatagcattgttcgccttatctttatttttccttagtcaaactcatggaagcttaactcttttattagctgccgctatactaggtcttggttatggtacaacttcatctagtgtacaagcaattgcaataaaggtttcaccaaaacatcgtataggattagctacttctaccaattttatatttcaagatttaggggttggcattggaccatttatattaggttactttgtcccattaataggatatcgtggcttatatatgatgatggcagcagttgcagttctctgcattttcttatattattgcctacacagcaaaaaagcaacttctatgaatgatgataccgaatcaataatggcttagagctttaatataattaataataacaatcaagaaataattttgtatttgcaaatagaaaaactaatggaatttaatcatataatcccattagttcttttatttttactatttttaatttcttataacaaatcttataaacaatatcattcttagttttcttaaaacaatctgatatttactacagtattctttgtctatattatattcctctcttaatcgcaaatatcttacgtaacttggaagtactcctcatctaagataacaatctaacaatataagtaattattataaataaacctgcgactatcgcaattattccgccagtcttacttcctttattagtctcttctgaatccatactttttaataagttaatttcatctaaaccaccaaataatagagaaaatcccagaaatataaatgcaatatcactatgaataaaaaatattgaaataattgtgagtccgctaaatataatgcttactataagaaatactttattgttaattttcaattttaacacctctcacacattataatttatacgtattttcctactttctgattttttccaatgaatatcatccaatttttaaatcattatagcaattttcataataaaataaatatatatgttgtaaaaataattcttcatagtaattctaaaaatattgcaataattttatccgtaattttgaactgtgcattgtgaattgcaatatattacataaaataaaacatatcatctataccttagagatcatctcacttagtaactttagagaagtaacacacattatgatgataattattaacggctgcatcgtaatacacctgattatttcatacatcctatcaatgattctatgtgattttcttttattccttctactactaatctcgctatctcctttgctcctttttccaaaaagtgagtattgtcttgaatcccatcgggatgattgagattttcacctggtctcacccataagaatatctctttagttttctctattcctatttgctcaaataaacgcttacttttttcacccatatctattaatggtacgcttaattcagccgcaagatctcttactgctacaagataatctccatgtgtgtcttttataatgccattttcatcaaaatttcttctatgtatagatgttagtaatactgggttcgcaccagcatttctagcaactttaatatattcagttaaataagctttatatgtagtaaatggatctgtatataattcctcattttcttttttatcattatggccaaattctataaataaaaaatcatccgccttaattaattcagatatcttttgtaatattccttcatttataaagcttttagaacttcttccattgatagcaaaattacaaatttctatatcactagtaaaaaattctccaattctttctccccatcctgtttctggtttttcatccggtaattttgtagcagctgtagaatcacctgcaataaaaatttttatctttctatccacgttaatttaactccctttctaatgaatgtatttcttgtccacaattcacctaattttatcgtaaccgcgctctgaatttcttatataacttttcaattatgaaaaaagtgattataaagaaatctattgcaaaggtagataaaagtaaaaatattactcctccaccacatccatcatcttctgaaaaatataaaagtccataaatacctataaaagcaattattaataataaaattacatatcccattatgtttttatttaataaacgttccaatactttcactgcaaaatatataattccagatataattaatgcaaacacaggtaaaattccaattaaccccataacacaactccttatttattagcgtacaattatttgcaaatattcttcttcacgtctacttaaatatataaaatatttgctcagagtcatctactctcagctcttgtttcaattattgtgaaaaccgtctgaaatattacaactgcaataactgaaaaaatgctatcaatactgttatccccatgtacattcccccatatatatgctgaatattttaaatcctagaactctcatgctaaataaaaacctaaaatatagaaatttaattacaatatatagatcaattctcctttaatattgcatgtacacattatactataaatgtatttttttacaagtattctatgttgaaattattaaatatgaacgctaagtaacttgattcattcgcatagaattatttggtttgtattcatttataatttaaagtagattctaatgaaaaattaaacaagctcctcattgttctttgtccataaaactttgcttatagcttttaaaataatactagaattaattatgatgtttattctaattcataactaatgcattgttaattttttaactatgaattttatttaccactaatttataattattaacttcgaggtaaataaaattcattatcaaaacgacatcatttttaaatccaataaatatacttttagcctaagccatatattctttaaatggcaattgaattattcttccactttcatcacatcgatactccttaggacattcaaaacgtattttgcctgataaatgcattgcaacgtcaaaaaatgcatttgccataacatctggatcctggaaaacagtacctgccatatatcctttttgtatgaaatatagtgattctggaatagcatcaattccaacaacaggtatattctttgtaccatcacctttattatatccatgcttttgtaaagcttttacggctccaacagccatagtatcgttattagctattactacttcaattttatttccatatctagttaataaagcatctgtcgcatctctagctaaatcttcactccaattacaaaattctgatgcaagttgttcaacttttattccagcatctctgattgtcataatgcaatatttagttctatctgttgactcattactattactattaattccaccttgcaatactatatactgcataatattatctttatttgtatctatagtatttttattaccattccataaattagccaacaattttccttgtagccttcctgcctgctctgaatctggaagtatataatatgctttatcatatgatttaactatattttcatctaccttaagtattcttttactagcaaaaattactggaatatttttttctttgattgaattaattagttctttgggatcgtttactaaatccactaaacttaatatgagaagatcaatatttccgctttctagaagattattaatagtttgattttgtatatctctgttattttcactattataaaaattaaatttaactattccttcatttcgtgattcaatatcttctaggctatgccttaaatcaataacataaggatcatcgaatctataaaaaaccactcctacatttactggatttgttgaatcattatggctatttagtgggactgcttcaattaaggtttccattactataactgttactgtaattattattataattttttttaatagcttcattctaaaacctcctgtaattctatctaatttataggattacttttaaaaagaaaattattctaaattctatattaataattataaatacgttcttataatatgatatttaagttttttatacttcttttatatatcaattgatattcactttaattttaaagaatacttcatatttaacattctaaacctacattttatagaatttctatatgaaagcaaaaaatatggtaaattcatttctgaatattaccatatttaagtaatcctctaaattatttttttttatatacggcatataattttataaatacttttcttattattaataaaacgtaataaagaatcactatatcaaggaataaatttactatattaatgttcattccaatatttccattaaataagttactgaataaataagaacttcctccgtctccttgatatacagaccaataatttaaaggaaagccaaacgcgtactcaaaaaagcttcccatattctgttctattttccctggcaaaacaaaggtgcttgttaaaactataaatatacttaatttacattccaaagtctctattcttctcttaccattcatattttctaattctaaagtttcttttaagaacatatatccaaaaacaactgccggtattaaaaatattaaagatataattgctgtataatgtagtcctgtatcgatatttgaccatggacctaaacctatagactttaatataagatccccgtaactaggatttccgcccaatgaaattccaaataatattcctaaagcaaacaacattaatgaagttattcctagcaatacctttctgttaattttactcaaaattcacacctctatttaaacaatattttaactttaattacttatatatacattatattctttaaatccatgtttcacaatatctcttttgccattgagctattgcatgttatcttcaactaagaacctggctttctaacttttaaatttattatctcccatgatacataacactaaatttttcatttactacaatttcatattgatttttaaaaaatatatctgccaacatctatacgactctacggataatagttttacttatgtttataataattaagagataaatatattgaaataccaaatcagaatgcatatcttattatacaaaagcacttaatgaatatttccaggggaatattaaaggtacaatgtttaatttaggcgcaacttgccacctaattcatgactttacagttcctcaacatgctaatgttcgcttctttgctttcattaatctaattctatcaaccaattgtgatttataatattccattttaaatccaatacatataaggactgaactaatgaagttcagtccttatattttcaatgctacgcatgagtttgtaatactatccactatatagataaacaattcaagaattagacttattagatgaacatatttacaaattttctaaaacttcgagttcatatcttcactagaaatcataaatatatttgtgaagaaaacatttgaaaatgagctgttaaaggttcttagctgtaggttgttccaatttagcttgtcaaactgaaagttggagcatgctaaattggatacaatctgccgcttagaaacttcagcgatattttcatagcttttcggaacaaaatatttatgatttcggtaagttatcacataagtttagttttaaatttggatatctatagataccaaataaactaagatctgaacttattcatatagctcgccgaaataagtactaagcatctcactattttggtatttgtctcatagctttacctttttcactataactactatcatttacagattgaaccttaaattttccgttttcatatgcaacttttgatatacttgaattatccatattccttatgtcgaaatttttatctagatgttcaataaatactctaagcattcctccatgaactactattagaatattccctccaccatcttcttcattttcaatacatatattatttatagttgttacaaatctttttaaagctgtattataatcttcagcctcatgcgtttcatctaatgcagcacatgaatcacaatatgccctttgaaaatcatatttttctgccatttcttcaaatgaagttacattaaggaaatcaagtatcgccttaaactttatcttctcaaactctccttcatattttccaaaatatacttctcttaagccttcaaattcttttagttctaagtccacacttgccttattctcttttatgacaatttgagctgtttttattgctcttcctaaatcactgctgtaaactgctttaaacttcacatcactaagtcctaatcccgtatttacggctacttcaattccttccttagttagaactccatcacaccatccttgagtccttcctactttatttaagatagtttgcccgtgcctcattaaatataaagtaactcttcccttatttttatcactcattttttcccccatactgcaaaatcatctacctcttctaatttatataaataaattatatcataaattgtaaatactggcataactaatctttaattatgagctatagtatgatattgaatctatttatttaattcaatatgctaaattattttagctgctcccccttgatttctatagataacttaagttatactaattttgcaaaatggacttggtggcaacgaaagttgctgccttttttattcttaaggaatttatattccgatagaatctgtgaacattttgccccttgatgatatgaatcatggaaaagaatgatttagaaggttacgattcgtaaagagaataaaaaagcagctattggatttccactttcagatacaccagaaaagtccaatagctgtttttattaaaaagatattcctttattatctaaattctataggttctaaattacctaaatcattttatttgttgtattaatgactacattttaaatttggttttaatcaattaaacttttagaatatataaaatttagcataggtttctatgaactaacttttccaaatatacatgcaattatgcagccacatttattggtagcacaatcgtaaatttagtcatatattcattactttcaactttaattcttccattatgcttttcaattaattcccttactatgcttaagccatagccatgattcttgttattattatttttagtagtaaatccagaatcaaaaattttattaattatgttatcgggaatcttttccccgtcatttgctatatttataactatattatttaaatcctcgtatgattcagcaattatagtccccttattcttcatagcctttaccgcattgttgactatattaattattattcgatataaatccatctctttcattgttgttaacctaaaattggcattatcggatacaataacttttatatcatctcttataacatgcttagtagctagtgatagaagtgaagagccttcagcatctttttcataaacatttccgctgttttgatatgtatttataattcttttcaataagttggacgcatcttgatacatattcatatcacagagttcatataaacttaaaatatttagattgtaattatcttttatatttttaagttcaatattttttgatgttaaaattccattcaatttatatatttcatccgaatcttttttaatctttctaaaatctattatattaaatattataaatccaattaaagctataactataatatttcttgataataccggctcaatatcgtatgaaatattatataaagaaatcaaaaaatcaggaaagaaacttattataattatgtattttacagagttactttcatctagtaatagcttataaatctgcttaattttgcttttaaataaaaagcataaaataaataagagtatctgagagagatacacaagtgtaatgtatatattcgctatatgatcttccaatgaattaacatctagcattacatatagtatgttaccaaatgtcgacacccatataagtactattgaatatattaaactgtatgctattattggattcagcacattttttctaaaagtaaaatatataattaatattcctaaagtatgtgttataaatatgcatattgataaattaccaagtaaatatgtaataataaatccatttattgacaacaacactatacataaaactagttttttattgtattttattttctccttttctaaacaatagttaactatataagtaaataatatactttgaaaaactgtaattaatgcgtcaatgtattgcacttccaatctacatctccttttacaatgttaaatagccaataagttattatcttaacttcttcatagactctggcatatcttcaataccagcgaaacaatatgacaccataggtgatttagtcatagattttgaaagatttaatagtaagtttgcaatcattttttttattcccataatacccacctcttaattattatttacattaaattatttagaataattaaatcgacatatgaaaagaagtaattctatttaagaaatcagagatgtaaaattggaaatgtatatctatcaatttttatcttatgttagattatcaaacaaattctttcaattcattttccaacctaattattccattaattacattataatatttattatgcaattattcaacatttatagttatattaaccaaaatcattgttacattttccaaaatatattcatattgaggcaaattgtatttaacaccctatttactaaccgccttctctataaatatttgcctgctatttaaatatttatctatgattaaaaatcacgcttttcatttctgaataatataatttttatatatactgcattgtatttgcaatcttttaatttgttataggagttgttatttcaatactattaccttcactatctctaaattcagcaacccaattagctccaatctgttttattggaaatataatttctaatttttctaatttgcttttaagaacatcaaagctattaacttctatgcttggtaagcaactatttccaaaaacatgtttttcattaactttttcataagcaaacaagccaagacgaaaaccattaatatcaaacacactataaatctcatctcgaacggttacagtttgctcaaataaattttcataaaaatcaattgccctattcatatctttaacgcataagtataacgatttaatactacaattcattttaatcctcttttctgcttaaataattaatcctctagaatagcaatagcacgaacaggcgctccatctgaatctttaaattttattggaagagcacagaatgtaaaaatgtcatttcccactttatctaaagatgtcagattttctattacaactatgtctgtttcagcaaaaagctttttatgaatagttaaattttcatctttaataggatcaattcctataatatctatccctacccctttcttcttactttttattaagtattcagctacttcttctgtaatatatggataatttccaaaataagcgtctgtcccccagtatttatcccaacctgtataaaacaaaatatactgtgctatatctgctttttcttttacagcttcaatatacttcatcgtaatcttttggccttcttttaaattactgcaatcaattactatgccttttccaacaaactgttctgcactaaatgaatccaaagttgttctttgagagaataagtgtgccggagaatccatatgcgttcctgtatgagaaaacatagttagcaatgtttccttaaagccatctttctcataggtacttgcgacttctaatttaggcttctctgttcctggatataccggcatattctctgaaatggtatgtgttaaatctattactttcatattaatctccactttctttacatgttttaatgtaatatctttcattctataagtattataatataaaaagatcgcatatcattctaagtgatgcgatccttgaatataaaattataaatttgtttataattttctttaagtttaatctggtaatgtaaaatagttatcaatatacgctgtcatttgatctcctaaagttagataataatatactggtattaaataacttgaataaaatagcctttttgactcttcttcagtaccttgaagtgctcttatcaaattttgctgatgccttaaacttataacaaaactttgggctataaatgatatttgatccgaaaaaaatacatctgaaattgaatcactataagttcttttatgttcttctaaattacgaataacttgttgatattcattaattatatttagctattataagaattctattctatataagaattagtaatatttgaaactctacagatattataaataaacccaatacctttgtgtaatcctatttccttcatccacttcattttccaatatcccattattatttactattgtttttgcagagccaatattatttttgttgcaagtgattaatactttcttaattcctagttttacacattccattagtgctagtcctaacatctctgttgcatatccttgtcgtctttctgattttctaacactatagcctatatgaccaccaaagtttaaaagatagtcattcaatcggtgtctaagatcaatcattccaattaaatgtccatcgctaacagaaacagccatgtatgtagttgctggaactaagctatctcttacagtttcttcttttgaattatcaccaaatgcgctataccattcttcaaaagtcttagcactacctaatcaagctgtaccatccatgctgtcattattttcaataaactctcttttataatccatgagtttttccttatcttctaaagttggtaaaattaaatttaatctgttcattctctcctccaattattctattatattagttttaatcatttactatagatacttagattagatttctatattttagtctcatctacaacaattttatttattaatgaactccaaactatttttagaattttagagctaaataataaaaaatcacaaattcacttgcaatctattctctttaaagtagatagatagaaaaatcaaaatctattactttaagtagaatatattattatgaatactgcgatttttaatatgttatttattcttattttttattgtgataacgaacccattttatcaaatggataaaatctaaaaacagccttacctttaatattatctttatctatatatggatttttccatcttcttgaatccaacgaatcaggtctattatcgcctaaaaagaaaaacttatcttctggaacgtcaaaggttctattatatttttcattgttttttacatagtcttctttaatatcatttccatttatgttaacaataccatcatgtattacaatatgatctcctggtagcccaataactcttttaataagcgttttctttaattcatcagaatagaatacaataatgtctccccttttaatattgcccctattatatatttttgtaacaaccatcttatcatcgacgtttatggtaggtaccattgattcactaggaacatatatgttaaaaaacaagaaattttttattaacatagctattataagggctactgctattggaattacccattccttaaaaaattttataccttgattcttatagttgtgattaactgcactgtccattacttctctccttttgtgttgatcatttttttatcttgtaattattatatcacatatcaagaatatggtattattcattgatattttaagtctatcttaaataatactatcttctctaattcatcgctataaataaaatatagactcatctataattaatagttgttaactcttagcactgtcatcttttctatatacctactattttacttcgtctttccataaggatagtatcatgccatattccatcagcatcacatccaattttttctcttaccccaacaactctaaaaccacattttttgtgtaatttaatacttgcttcattaatagaaaatattcctgattgcagtgtccatatattttctttttcagtttcctctattactctattcataagtttatatccaacattattcctcctacaagattcactaatatagatgctgacttctgcaacacctttatacacacatctactgcttgttgggcttagcgctatccaaccaataattctattattactattagtagcaacaaatcttcctatatttaaatgtcccttgtcccaatcttggtatctaggaatttctgcttgaaatgtagcctttttagtttttattccttccatataaatatcagcaacactatcccaatcttcttctgtcatttttcgaataataaattccatacttatttccttctttcagttaacttaattattaaaacattgcatacaaatttctttcctattaagtagtgggatttcttagaaataatactaatttatctgtaaatcatcatatcatttttccaatttatataatagtaaatcttcaaacaataaataacaactccaccttatttagtatcaattcattcatgattttaattataacatatattgtaattttatgattattcttcataaacattgtcttaaaatcaaataaaaaggtagattaagtattttcaatttaatctaccttcacgggtgttttatgactttattttaagttttcgacttaaataataatatactattatcacatgttaatccatttattattttgctctctacaaaatgaacaatgcaactttaattaataagcttttttaagttaaagataatttatacatataaattctaatcattaaaatttcagtaatcatcttcaattttctatatatttcctagaaattagtttataattgttaatgaattaaaatattttatctagattgtagggggaattcataatggctggttgtaacgaaaagaattgtacatgctctaatattaattgcgaaagacatggtaagtgctgcgaatgtgtaaattttcatcgaggcaatggaaatattgtcgcttgcttaagagatttcaaggttgaaagcaaataactgaaagccttatccaaaaccatcataatctaaagccatacttaggctttagattttcatcttaattttccatttaactttaatatttatattaattgaagtatgccttctattctaactcccaaccatttttaatacaatcttgaagccctttcaatatttctactgctctatgaactaaatttaatttagcaaactgttcagccattggtatatcttccaaattattttctttttgatattgttccttttcccacattatgttgcgtccatacgtccttgtatgaacattatttataacctgccatatttgtccttcatccttgttgttattattgcaaaatttctgtactttttcttctaatagctctccactgcacatcataattgtattatctcctttgatttaacatattctattaattttaattctttccaaaatgtccacctttaaaacagtctatgttaaatcatctataatctcctgcaatgtgaaattattctaaaatataattagaatatctacatcattctttcacataataatagtgcaatctgataactacaccccgaccatttcctcaaaatggtagttgtcacttgtttcattggaataggggcttaattatgcgttattagctcctattccttattattttttcgataaaaaatataataagtcacctccaaataattttatacttactatattactgtattatttacaccataaaacactcatatctaaatacctttagttataaatatatatctgaaaattctatattggtagtttgaacaagtctattatcagtcattaaatcaatcatcggtttttcatttttttcttctattactttctcattaggaagtaatattttaaaagttgtacctttgcctaaattactttttacacttacactcccccctagtgcttcaacaaatctctttaccaatgacaaacctatacctgttccttctgcctgccttgataaagaactctctacctgcccaaatctttcaaatattacatctatcttatttcttggtatacctatcccattatcttttacttcaatacatatattagttttcgcagaatgtaaatttacaataatagattttcctgctggtgtaaactttattgcattggaaagaagatttaaaataattcgttcatacttttcatcatcaacccctattatctttttcgtaagttttgatacaaatgttaaccttacacccttttttgatgcaaattcatatacagattcagttatagcttttgttaaaaaaactatatctatattttttttatttatcgtgatccggcctgcattaacacgagtaatatccagaatattattaactaatcttaattgcctattagtattttgcttaatagttcccatatatgcttttatcttttcggtcatttgatttgagtaaactaaatttaaagtttgtatagctgtattaattacattaagtggtgttcggaactcatgggaaataaatgataaaaactcatctttcatttccattgcctgctcaagtccttcgtttttttcacgctctacagctagcaacttttcttgtacttcttgtaaatcttgttggctttttatcatatctgttacatcaagaaaacttacaactccatataaaaaatcaccactattatcataaatcggcgtcccactaatgatattgtaatattccatatcgtcttttttaaacttcacaatattatttcttactatttctccagatttcacacgatatattggagtttcatctattggcattttgtttccttctaaatcataaagctctgtaactttataaccttcccctaactctttaaactctccagaaaaacgtttcctagccactttatttttaattatatacttaccatttttgtcaaatacataaatcgactcctgcatattatctaatatagcttcaaaaagttctttctgttctttaatatgcttctcataattaacttgttctgtcacatcacgattaataattattcctaagctaacttctccaatttcatcaaaaacaggagttgcattaaaatcaaaatatgacgcatcgtctccgtgctttatgattattctctgattcttaactttttcacctcttatgaccttcatagaaggaaaatcttcaagtgaaatgcatttgcctttttcatcatagtatatttctccactttcaaatgaatcaccaactttatcgactggcttatcaagcgaagtaaactttttagtatattcttctactcttttatttgttcttctatacttaccacagttatccacaacagttaagccatctgccatattatctattattatttctaattcttctttttgctgttttataatttggttttgaatttgtaattctttttccattttcttattctctgtaatatcacgattagtttcaaggacaatttgctttccattttcatctactattaactgcaatctagtttcaactaaaagcttactcccgtccttcttaatttgctctatttcagcatgccaaattccatcacttaaaagtgttgattttatgctactaaagctaataggaaatgtagtttttagcagttcataactaatacttcctatagcttcttcgctgttataaccatacttttcctctgctcccttattccaatatataatagacccattaatctcccaagctaagatagcatcataagaaagatttaataggtttgcctgcatcatcagctgttcattttgttttttaataacctttgtttgctcttccattctttttctgtctaaaactttttctgttatatctgttgtaatttcaatacaatattttagaattccatcctcaaacaccggagcgagactagcctcccagtacgtcactcctctttcaaattcaaatatatattcatcactgtaaaacggtttctttgttgaaatcactcctttccatacttcttctgatgagcttccagtccatccttttattatttcatttaactttttgcctattgaattttctatactattaaatggtttatcgagaaagtttagataagtttgatttgctttcaatagagttatatctggagtactaaaaacagcaattccaaatttattatgagcgcatagagcttctactgctgcgaatttaacatctagacgtgaatttggtttttctgagaaaatatacacatttccaattgcaccttctgccacatctatatttataaacctagcatctaatgatttagtaaacataaagtaatctttctcaccatcaatatcttctaaatcggcattaggcccgattttcaatatattgaataattctttgatatttttatttaatagttcttcctctgaatattcagtcatttcaataaataacttactaatttcagtagcgatcccattgtctaccactatatatgattgttccccaatgaaatcgaaggagttatataattccataataaagccctccaattttcagcttttttcatttgtgcttttgcacctatttatcattttactataatattccatgtaatactaccggtctcctatgttaataggtaacttatcgagcaattctgcatatttactcaaaataaacgtgcctttttcttcatcattaaatactttctacatattgtgtaacattttataattgcatataaggaatttcgttttaattaacgtattacatttaaatattaagtcttagctttaatattagattcatatagactctaatatttccagtaaataaaaataccgcaaatccaaattaatgaatcatgcggtattaaagtaattattcatacaaaatatttttataaaaatattttcttaactataaaatcttattctccaataaacttcattagctctttattaaattcttcacgttgatcatagaacgctgcatgtccactgtatttgaatggaataagcttagaattcttaatcatcttttcttgtatctgtcctaattcgaatggaacaattttgtcatggattccatgaataattaaagttggaacatctatctcttctaaatcagaaaagaaaacttcatttatccaagcctttgcaattgctgctgttgaccatcctgctgcctgcaatcctagttgaaagaaccactgtgaaaaagcttctgttatatgttgataaaaaaacatatctccaaatccttgaagcattttaggtctatcggtatatgttccttcaatgagctttaaaactgtttctttatctaaaccataagggaaatcaggacgtttaataagacttggagccactgccccaaaaagagcaagttttgatactccataacctttatgacgccccatatatctaacagctattccacctccatttgaatgtcctgctaatgttatatcctttaactttaatgtatcaattacacatttaacatcgtctgacaaggtatcaaaattatagcccctatatggcttatctgactctccgaatcctcttgtatctatcccaatgcatctatatcccatctttggcaaaacatcaaattgatattcaaacagtttataacttcctggccaaccgtgtataaataaaattgttttatcggcaccctcattaaggtcttctacatagatcttgacatctggttctactttgacatagtaacccattataataacctccaaaaaactatctataatctatatcatatcaattaggacatgaatttgtgaatcatcaattttacttttctattttcacaccattccaataatcaacaccattaagcccgccatattgattacgtccacatccccatgtaccattaaatcctatctttccattctttttatagaaataaaatttaaatgcgccaaatacacaagcgctttcagggtatgcataaggataagatactgttgaccatatacctgttaaagtcaatatacttgcattataatatccataaatatacggatatcgacccacaactccatttggagctagctcagttaaatttacaattccatctattgctccattatctatagatgttttaaatgaatacctacctaatatttctgtaaattctattttgtcagctgaagcttcgtaagaagattgcattctactcttcctttagtattatttattctagttaatagtatatgaacttatatttaaatatgtttatacatttattccctacaacattataatatctaaaatttattaatataatttctttcatgtatgtttcaaatccctaactgcttcatacatatctctttagctataatcccaaactaacaaattctctaactttatctaataaattagattgaactacctttaatcaaattgtaaaatccactacctcttgattaattcctttgaataatttcacttaatattcacataataattaatacattatttaaataatctaaatttatgaaaggttgatagttttaatgaaacgatatgttatattaatttttatatttctattaatctcatctactaccatatcacaacttgcctatggccaagttggtaaaactcttagtcaaggaatatacagcgcaagagatgcaaacctaaaaataggttcacctatagctgctaaaattgactcaccaaacagcagagttattataatagttattgatagcgatcagcagttgcaggaattaatacgtcttggtcctcaatcgcctcaacatactataaaacctcttgactatggttcatctataataatttttggtgctagtccagtaacatttacttaaaaatacttattcattatattttttattgtgctgataattataaataatgatttttaattaactattaatttctttatttactttttatatatttatgttaaattctatccattactatattttaaatttaaaaatgttatgagaacatcacgctgcacgcaaataaacagtgtggtatttttataacatttttatctaattcttcctgctttatactgcattactctctgccatcttctaaacgctttttcatgctattactactttcctataaattgactttcaattaatcgcttaatgtatcgggcttataattccaacgaataaattttataatcagagataatctattattatgatttcctaatctaagtaattacatggaggattacaatgaatatattaaaaaagctcattttattaattctcgctatttttttattaaatattattgaaattaacacatatgctagcccaaatactactactaataatccagttaaaatagcagtatttttactggatactgatgaactatttctttcccatttttcagaaagtcttaaaaacatccagaaagaaaatggaaataaagttcaatttactgtatttgattcagaaagaaatcaaggaactgaaaatgataatattgctaaggcacttgatcaagattttgatctttttgtaatagaaccagttactttcaaactagaagaattaaaaaatacttttgacatgatacaccaaaagaacattccatttatactattaacatcaccaagcagagaagtatcaaattttgctaaagaataccctagaactattattataggtggagatgatgagcaatctggcattctgcaaggcaaacttcttattaatgagtggaatacaaataaaacatatttagaccataataaagacaacatagtgcagtacgtaattctaaaaggacctgtaagcgatcctgctactgatgctagaagtaaatacccaatccaaacacttaatgaagcaggaattaaaactcaagcaatttcatctaattcttgtaattgggataagaaatgtgcgagagatactatagaatcaattatcttaacacagaatggtaaaactgaagcgataattgcaaatagtgacgacatggccgtaggtgctgttgaagccctccaaaagtatgggtataacaaaggaaataaattcaaatatattcccgttgttggagttggcggcttaccagaggctactgaattgattaaacaggggtctatgacaggaactgttatacaagatccttcagattatgcaaacgcagtttattccataggaatgaatattgtttcagggcaaaatccgcttaacggaacaaatcataaattcgatgagacaggtaatacagttaggattccttacaaggaatattctaaacaatcatagtttttttaatcataaataactttccttaattagctatccttaattatatggaaattattattctatttaatgattatatataactatttttgtctataattatattagacatgaattactattctcctaacattaaatataagataaggcagctttttaaattactgccttatcttatatttatataattgatcttttaaaaaccatttgtagtaacatttttactactccataatatattaatcattgtaaatgacattttcttcacttctcactgaaatttatgttataaattaatgacatattctttagttctttaatacaaaaacaaaggcagcagccaaatttttgatatcatttttacggtagataactaatgtaaaaatataaataattttatctactaaaatgtacttctggatttatgtctgctgcccattatttttatttcggtcatcatttaatattagtatctatcaaaagtacaaaactcaaataattgaatcaactaatctcattgatttttataagtatcattccattcacttgtcgtaacataagaagaatcaattgattttagatatttatcaattttatctgtatctaattcaccttttattacgttataataattattattgataattataggatttacaaatgttatatccattacatccttataatttatataaaaatgtgcagaatgtatatatccatctgatgcttcaacatttgttgcttttttaatggtatacccatctaaatatcccatgaattctttaactttctctttatcacctattgttattgatttaccgcctcttccatcataaaatactatttttgtaacatcatcaaactttataccagttacaccacttatcttttgagattcagggtcaacatttgttgaagtattaattgtaccattatttgtggataaagtggcagctgtatttccggtagtgccatcattcttttgaatccagactccatttgaatctactgaataacttccaattgtagtacttttagccatagcaccactactatatagataataccattttccttgatattgtacccaacctgttttcatataaccattgccatcaaaataataccattctccattaatgcttctccaacctgtagcatattcatttccttctgtataccaccatccaacattatcttgtttccaagctgcaaatgctttaattggagctaccgctaaaacgcttgtagatattaaaccaattgcaactaatctttttagatattgttttttcattttatcaacctctatttcttatacttactaattatcagcaactaattccagtataataaatcttagtactagtatattattaattttaattgcttcaaagtgctttaattatagccgaaaaaaattaatttaatcttaatcctaaattacaattatcataaattaaatttttattagcctaaaaaagtactacaaactcacttcaaaatatggtacttaaaacttttattttatcttccttaaagttgaaagttaatattttttattaatgcatgtgcatactaataaaaccttatgaactatttccctccaaatgccattgtatactccactgcttttgtatcttcatttatgtgttcatctataaccttgaaattattcttcatataaaaatttactgcagttacgttctttgtaaatacgtgcaatgtaagattatcatattcagatttgcaatactctataagcttcttaccaacaccttctctttgatattctttttttacaaaaagcccagctatataattttgttctactattcctataaatccttttataatattattttcttcaaatatataaatatctgctgacggaagcatttgcttaactaattcaaaattatccctccaatattctttaggtataaaatcatgcgcctctatatttgtatcaagccatatttccattaccttatccaaattatccaatttaaaatctttaatcatttttttctccttatttcctcccaaaataaaaccattttcattatgctttgtgaatgccttacttaatggacagtccctctgtctataaattattaattaagttttattaataggcttcatgtttattgtaaatttaagcttttttctttttcttacgtattcttatgctaccttgctcattattcatccctgtcttttctattaatttagtgccaaatgcggcaacctcttgaatatctattacagttatacaacctgtttttaactcttttaattcaaaacttcctctcattccctgttgctttgcattccttataagttctcttaattttaatatattctcttctgttggttcttcatcagttaaaggagtaaaatacccgatatatccacttttgaatactatttttatttctaacatcatcctaaacctcttaaaatcaaaattactatctttaatatatattcattaacgaggtctatacatgttattatttcaatatttttataatgaggatacttaaatacttgataaaatcactagcttgtatcattaatctgcaacaaccaaacatgtaattttcttcattaaatattactagattttattttcaaatgtatataatccccataattaattatatcttacctttagtaaattttctaattagagcatctccaattaaaattagtggtaccgctatacaaagatactcccacaatttcaaatctaaattatcttttaaaaccattgcaattaataaactaacggcccaccaaatacactgtatcgcttttagtgttccattagaaaaaccaggtctcttaaacataataaactccttccccatttactaaaaaccaacttctcattttttttaattaatgtattgtattatgttaagcaaaattttagctgttgttataaatattactatacaaaaaactcgtacactttttgcatttcttattttaaaggattattaaaactacttaatataattttacatttgccataatgaatcaattatatcatattatttaatcacttccacaaaattacagacaaatagattaactttaatcatataattttaatatttaatataaaaacactacaaaatcattagatattgcagtgtcaatttatatataatttctaaacagctaattcttaaatatgggtttcccccatttcctatgcaccttaaagaattatctggtttagcattatatttagtatataatcttataaactatgaattttgttaatcagaaactcctatctaaatcactttaagccgcatattcatgatatggcaaacggatagcaacttttgtatcatcaaacttatatttagtaccataaagcggatctctaccttcaaatacattcatacctattgcataactcgcttctgccatttcatatggatcttgcataacagaacccgccataaaaccttttttaattaattcttgtgcctcagctgtagcatcaattccaacaacaactattgtcttatttttatctcctaaattatatccattgttttgcaatgcctcaacagctcctatagccatctcatcattatttgcaattattgcctcaatattcttgccatattgcaaaagtagtgaactaatatttgttttagccagatctctttgccaatcggcagcttttaatgcaagctgctcagtttttattcctgccttatttattgttccaatagaagactcacttctttcccgtgcctctatacttccatgttcaccctctagcataacatattgcaaaattccattattattcttatctataaactctctattcttgttccatatatcaacaataatttttccttgcatctctccagcttctttagcatttgttcctacataataagcttttccataatacctaagtgcatcaacagatactggttctctattaaaaaaaattatagggatatttttagacttaaatctgttgataacatcctgtgtggcccttgtatcaactaaatttaccattagaatatctgcattatcactgaccaaattgcttagtacttcatcttgtgttgattggttaccctttccatcataaaatctaaataccacttttccttcattttgcttttgaatttcttctaagttttccataactaaagagacatatttatccttaaaattatacagaactacatctatcattacagatctctgacttaacccatttgttccagcaataactctagcatcacatactgatacctccattgcagccacgataaatataatttctaggatcgctaatattctctttgatatattcatattaaatcctctctttcacttttgttcaacattattgttatcatcggtgaaagaaaatatttattttggcttttattaatattaaattttatacaaatctctataaaataaaccagttagcttatattaagtataataaactgattttcatattattatattattagataaccttcttttcaaagcagattgctttagaatttccattgtattttccataattctgtatctgatggtaccctcttttcttatagaaatttactgcttgctcatttattaatctagtttctagccaaataacagagtatcccattttctttgcctgaagctctaaatatgatagtatttcacttccaacgcccattgtcttaatcttcgcaaacatccgcttaacttccgttatatctttattaatataccgtattcccccacatcctacggcctctccattatcatcatatgcaaccacaaacaaggaccgcggggcacatacatcctctggattaaaggaattccttccgctatctccagttataaattccagttctttagacaattcatccattaaacgtatggaatcatgatcacttggattcttttcaataatcttcattgttaatatctccatttctccaaatttaaattttgattttctattttatctaaatatatgataaaatcattgtgaaaggtggctaaataatgactgaatttataatgtcgaacttaaatatttttattcctttattacttatatttttaacgattgatacttttctactagcttatagagcttttttaataattaatactaacttaaaactgtcttgcaacaactcaaaaagttactataataaaaacaataaaatagcaattataaatctaactatagaaaataactcatctaatccaatagatgttataaaagtaaaattaacttctggatttaaatcacatttagcaacttttccaacaacacaatctgctaaaaataatcttaaggctctcgattcaaacgtactattagaaaacattctgaataatacaaatatacctgaacatacttccgtaactggttatgctatttttgaaaatgttgaagcaataagtgactcaaaaaactataatataataattaaaacctctaataaagttttaagaaagaaaataaaactataattctttatttatacgacctcattacatttttaataattgttgctatttattcttcccattataactgtattataatattttccatctttgtgaatacgatcatttattaataaaccttctttcacaaagccatagcttttatataattcaattgccttagtatttgtctctactgcagacaatgatacttttttaatatccgaactatctgaatatcttaaaatattttctagaattgctctcccaattccatatccccaatatttctttaatatacatattccaaactctgctttatgtctgaatctaactaacttatttccttctaggcgtgaaaatcccacaatttttccgcccacttcagcaacaaaaaatagatttagcttagaagtattatccccaaaaataattccttcaaaatcttctggagttaagaacgattcccctgattctctgtcaagattttctgtttctccatcaatctgagctcttaatttagacaactcatttgcatcctcttttctagggcatctaagtatccatcttaagtttttaccgtctattattttatcttctattatcattatgtgcctcctagtatattcctcataatccataattctagcaacaaatttaataaagatagccaattattaaaaaattgtagtttcgccttaggttcttctatttcattttctataagtctatttttaaataaatcatatcaacgagctgtattccattttcaaatattggatggtcatagttatctgtaaaaaaatttttaattctgtgtgatacacgaaatccacagttctcataaaatggaattgttagattgctatcgcctgtcccaacaatcatagttgtacactttcctttataataatctaaaatgtatcttataagctttttcccatatccttttccttgatatttctcatatgtagccatattctttaattcacatatattactatctttttttactactacacaaatgctttttaaatcatcatcatataaagaaaacatttctccattctctagatatctatcaatcatatcttcttgttcatctgctaacatcaataaatcaagaaacttctttttgtcatttatgatctttttaacctccattactcttccccccttctttaaataaaacatctctttatttccaaccctaattttgatgccaacaatttttacctatcagctttgcaaacaatcttaattgaataaattaccaattaataatttgaataattaaattgtaatttcatatactatctattgaaatgatgataatctgaattttattttaatctattaattaacagctgccctcgtaaaaagggtcagttctggcaattaaaaaacaaatatcctaaatgaacacaatttaaatctccaaagctctcagcatgagagctttttttattttcaacaattgctacttatgaatagtctaactaagtattcacataataacagtatattgacacgtcatgtattattaacataatttttttatccaaattcaaatatcgggaagtgaggctagtataaatgaaactaagaacttttttaatagcacttttgatattaatagtatctactatacacagcgcaaaagcaattttcgagtcaaatacatataaagaaggggtatatgatattacagatacgcaacaagttaaagccacagccatgcttacaacgccagatgagattgcaagcctaataatatttgacccaaatggtaatgaaattttttataaaaagtttgatactgcaaatgagtctgtaaatttaggtactattttagatgatgatcgtattgctatagttggaaaaggtgaaatagcaatcactattcagcaatagagctctcactcttaaatttattcaaatcataattattatcttatagcaataataatttccttataatgaatatttatttcttaactccatataatactcttgggataaattataactttcccttcattgtaatccatttaatgagcctcttttcggaggaggctcattagctgtgttatattctatttttttatctagacagtacatctattatctggcatttaatatacaatttctatattgatcaataaaagggaatttattttttatagctatatcaataatttcatttactggatattcaatgcgtctatttattaatttgacttcatcttctaagaattctaatatgccataagatattctattatccccatcaagagaatttccaacacttccaacattaaatattttcttaccatcaacttcccctataaaagaactgtgagaatgcccgcataagattaatctttccttcactccacttatagcctttttaatatcatctttatgtacagttccatcaattgcttcaactatagattttggtgttccgtgaacgcaaagtacttcaatattattaagtataattgaggactctaatggtaaattatctataaactctacctgatcatgacttaaatacttttttgaatatttataatatagatgcagttgcttttccttatctgataaattttctccaacttttaaaaactctttaaaccacatatctgtatttcctttaatccacgtcaagacttctagttcttcatcatttaacaatttaagaacctcagatggcattggtcctttcataactacatctcctagaattataattttgctaatccctagttctttcaaatctcttatagtatattttaatgctactccatttccatgaatatctgataaaactgctactatcattggttatccccctgttacaaaacatgtctttaatttatttaactaagatacataataccttataacctgtggagctataaatttatactgctttattaattttatgtactatacgaaacatctaacaatacctttttctctaaattaacagctcttaatattaacatattgaattcattataccacatattccatataatgtattttactttctaactatattcttttgtattcataatgttcagttattctgtatttttattattatactcttcgaacttcaacctaaaattcgtatcatagttttaagcattaaaatagcacctacatttgtggtgcttaattacaatttatatcaatatctactaactcaatttcattacttccttttggtaatttaggaatctcatcatcaccatatcttattcttattaaagatgctctatagatatcatctgaataattcccgtgttcatataaaaatagtaagctttctttttctaaacaatgtggcattatatcctcaatattatatttttttcctttgtacttaaatatacatcttattaaagttctttctgtatacatatttctcaccctaattatataaatgtatgctaaatcaaaaaatttgttccatctcctagtagatttgtattagtaatagcataggtgtaagttactatatctccaactctgctatatgcaggaccagtcttcgatatttgtatagagttttgaaataaagaatcaacaatgttgccatcacttatttcagcttgaaattgattttctgcagtagtaacttcaatttcctttgtttaaattgacataatttcagttcctctttatcataagtttactaactgtaatatattttatgagccaatgataaattatgttacacgtacttatgcatatggatttccctagcttaaaactttcttcttagttatatatcaattccactttttataataataattagctttatattaactcaactaatgctacttaaatttttttgtttaagttgtatattttacttaaacatcgtcaatactcttatatgaaaagagtaatatcttaattaaaatagaggcagtatcgttagtgtcccccactgatactacctctattttttatgtttttataataatcatatattaactacaatctcaaattatcaaataaatacttattgtccatttcaatatatataattagtattgaatttcctatagttctcagtaaatctttgcttatattgactttatggaatatgcataatatatctatcttacaaaatgccgaaacactttatagtgataaatattttacataagtaagtacaaatatttttagctataatttttttgcttataattaaatcacctttcaagaatccctagccggaaatattaaattttttattcttattttgaatatttctctctatatgtgcaatactaattatgtgacataaattaagttttcataattatttttcgggctcctcgttgtaggagtcccccccatcccaatgtatttccacataagaacactttattttttaattttatttaatttcctatcatatcttttctttaagcatattcttttcctcaacagtatttgaataatcaattgcccaatcacataaatcagctaaaataggtaagagacttcttccatagttagttaaagaatactcaactttaggtggtacttgattataagctatcctattaatcaacccatcatcctctaaagctctcagctgttgagttaacatcttttgtgtaatattaggtaaacttctttttaattcattaaatctcatggttcttttacctaactgccaaataattatcggcttccattttcctcctataatatctaaagttaattccatagaacaattgtattcaattcctttaaatctcatcatttttgactacctctttaatttcaagtatataaatagtaactacgttactaaaaagtgcgttcttgataataattcctataacatataaattatattttgtaagtatcctaaaataattaatctaggattttattaagtattctcaaataggagtgatatcaatggaattaattactgtaaatcaatcaacatgtgttaaatgtggactttgttcaaatgtatgcccaagtggagttttatctatgaatgaaaatggaccaatagctattcacccagataattgtatttcctgtggccattgtgttgcaatatgtccctctagttcaatagataatattaaaacacctttatctaatcaattggatttagaatcatttccactcatagattctagcactgctgaatcttttcttaggtctcgccgttcaatccgttgctacaaagaaactcaagttcctcaacagacactattaaaattagttaacatagctcgttttgcaccgacagctagtaatacacaaggactttcatatattataataaaaaataaaaagattttacaacaagctgcaaacatagtagtagaatggatggaagatcaacttaaaaattccccatcgccacattggagcttttcaagacatgttaaaaattatagagacgctggtgaagactcaattttacgtaatactccacacataatattagcaacatctacaaaagattttaaaaatggaataaaaaatactatttctgcattctcatatcttgaattatttgctactactcttggattaggttcatgctgggctggattatttgaaatgtgcgctttttcaaactataagccactactagaactgcttcgcattcctgataacaaagttataacaggagctgtcatggttggctatccaaaatataaatatagaaaaatcgtagatagaaacccgctagaagttgaatttattaattaatatccttaaaataaactgatcaacttttagatatttcataatcctattcccaaaagcaataggattatgcttctatctatataatagaacttaccaaaccactaaaaaattactttataattgctttcacaaatcaagattttatataattaaaatctataattcttccaaaaatcatttcaattactataagtattaatactaggattacaccagttgcaacttcaacattaaacgcctctttaacacattctatctattatccaaataccgaactcacaaaagttattatgatgaattaattataacatattttgtaaatgaaattttatactcattttgaaagtaactcctttatttattgatctatgctacaattaagtttctataatctattactgattacctagttaactagtatctaaaatacaaatctatccttttctaaagcatattatgtcttctactgcactttcactaagtaaattatacataaatttttttaacaatcgcatactaaaggaaaatagaaagaatagttcgattctttagataaaactatgaaaggtagttgtaccaatgaaaaaatttattattatattttctgttttcttatttatgtctcttagtattgatataaagagcgcttatgctgaccccaatcctaaaactttaaccgaaggcttttacagagttaaggatataggcttaatgccaaatactacttataaagttagaaattcatcccctactggtagatctgttgttattatttttgactcaaatcaacaaatgcaggaatttttaagacttgagccaaattcaccagattatcttgtaaaacctttagaatttggttccataatcataattattggaggcggtaatatcactttttcctagcaaatcaaaaaaatatctaaaattcatttgaatagtcttatattataaaagctttaaaattctacatattaataaaatatcaattttcttgggaagatatgtttctaatacactcttccctatttccatttatagatttaatagtccctctaaagtttttattaaattttctgaacttttatagtctaaaatacgcatcttaattaaatattatcttttattcgaatacttcgtggacatttacctgatctataaatatatcctttcttttccaatctctctatatgtgcatgtacacttgacgtagatgccaatcctgctagctttccaatttccctaactgttggagatatcttctctttgcctatatagttttttataatatttaatatttcttgttgcttttctgttaacatagaaccatctccctatagctttatatataatgtcatttgatatttaaagttgtttatctcaatataatacctaaatatatttaaattatcatacacgaacaagtgcaaacatacgtttgcatatatattactacttttagggtattttgtaaataagaatgcaaaaagaaccaaaactaaaattaattttggctcttttaagtctataatcttatacaattatttaacgtagctttattattttcttatgcttgctattaaattaatgtatagccttctttgcgtattttttccccgttccttcaacacttgtaattgtaactaatgcatcttcatcaaaaccatgaacaatattttttagttttgctatttcaagccttgatagaactacataaataacatttgtttctgtgccactataagcgccctttccatctaacaaagtaattcctctaccaagcctagccattattgcttctgatatttcattattcttatccgatacaattattactgcttttgactcattaagaccctcaacggttatatctatggttttaaaagcaataaaatatgctattaaagaatacattgctctatcccatccaaataaaaaccccgaagttcctaagatgaaaagattaaaaaacataactatttccccaatagaaaatgcagttctcttttctaatattatagctacaatttctgttccatctaatgaaccaccatttcttataatcaagcctactccaactcctattataattccgccaaatatagtagctaaaagtacatcttgtgttattcctggaactggatgaagcaatgttactacaactgacaagcatattactgaaaatatagttgaaatagcgaatgtttttcctatttgcctatatcctattataacaaatggcaaattaaatagaaatgtaaatactcctagttgtacttttgttagatagcttgccataattgatattccagtcatacctccatctattatattattaggtatcaagaatatctctaaacctactgctaccaaaattgaacctattatcataaatagtattctgcttgctttaacccaaatatcattatattttttcgtcatttaactcccccttaaatttaatatattttatccaatagtaaaaactataatatataaattataacatagttttcattactttattatatgtttttaatattacttaaatattctaattttaattttaaaaattaatttaataatgatatatctaatgtcactttattatttgggttatgcattattagctaaaaaagctctttaaaaataaaatcattccacttgctataagtaaagcaattactgattttttaactgtttcttcttccatctttgaatcaactttaactcctataatcattccaataataactgctggagaaagacataaagccataattaatgcttccttagttaatattcctgtaaataagtataagaaaaatctaaatatattatctactaaaaaaatacaacagatatttccgcggaattcatttttattctccgtagttctactgacatatgcaactaaaagtgctccaattccataaagcccagctaatatccctgaaattactcctattactataagaaaaagaatgttagttttcttattttgaattttactatgttttcttgttaacatttctactgcaattccaacaattacaacacctagtatacattttaatatccgatcacttccagcctttaatagtaatgttccaggtacaatacctgctagcagcatgagagataatggaatgacaatttttaaagaaatattttttctttctttccatgccatatatgtatttgttggaattccaaagagaagatctactggtgttgttaatctatttgatactacaaaggaaaataacgaccccataacaagtgtatttccaaagccagttatacctttcgtaaaatatgcaaataaagtagaaataaaaagatatatgttttgcattttttgccccccataagcttaaattatatctttaacttttgttattattatcaattataacacatttggtaaacatttcttctattgcttgttaacttctatatactccaaaaaaatttaaggtgtagaatcttcatacctactacacctcatcattagtttaagttctaaatttagctattaaatcttgcagctctatggaaacattctttaaatttttggcagattgatttatttgttccatacttgcagactgttgttctatagatgccgatatctcctccgtagtagaagctgactcttctgctattgcagacatatcgcttatgcttcctataacatcatttttattattgtctatactacttatgctaaatactattctatctatttgtttaacaatattagatgctgaattttctatagttttaaatgccttttcagtatcatttgatacctgacccatttgaattaccatatctcctacggttttcatttctgatttagtcttatttatttccttcttaacttccctaacaatggcatctatttcttttgttgagtcagcggcttcatatgcaagttttctaatttcctccgctacaatagaaaatccgtttccttgtacgcccgctcttgctgcttctatagttgcattaagagacaatatattaatttgtgatgtaatgcccttaattgcgtcagttattttctcaattgattgagatttgttatttaaaacactaacttgatcaagtatattttccgctactttatggtttgattctacaacactttttaatttatttatattctccataccttccaaatttgattttgacgccaattctatataattcttcactgaattagtattttctaccgaatcatgaatttcttttgctaaaacctctaatttatctactccagtttcagtattccttgcaagatcagtagaaccttgtaccatttcatcaattgccttcgctatagcctctattgactgagatgtttcaaatattatatttgataaaatgtcagaatttaatgctacatttacagaattctgtttaatattttccacaagttctcttaatgttcttctcatgtttgccaaggccatacccatatcgtaaaattcgtctttatatctttttattacattcaaacccgcttgatcaaatactaaatctaaatccgcagttttattaataaatttaaccaaaaagtttattctttttgtaataatatttattatagatattgttactacaagactgattattattataattattacgttcagtgtgagcattaatcttgagtgattataaatttgatcattttgtatattggccaaattcgcctgttcctggttatattgaacaagtttttcaattgcgctatttacattctcaaaatcctgtctagattctccatacattaaattaaatgcatccttattttgagattctctacttaattcaatagtcttcctgctagtttcaaaatacttaggataatactctttaatttctttaaatatctccatatcatcgcttgatatcatagttccttgatattcttttaattcatcttcaaactcttctctcaaatcttgaagttctttttctgtagcgttcattaagtcaggatcatcttctagtacatgtctgtattctctaagtctatattctgacatattttgatccatagtatgagccaattcgctcctcttataccaaacttctgcaatttcacttgctttatcttttacatttttaattgatattatagaatacactcctaaaaaagacgttagcaaaattattaacccaaatgaagcaataagtttatttctgattgtaaatttcatttgaacacttcctccaaaataaatttaaatctaatataactattagataattatcttgtttggcaattccaattatatattcatttccgttacatacatcataattaatcttttttatactatcttttggaatccttgtaacatcctctacttcatcgacgatagcaccaaaagctccttcactatcttcaataattattattttctgttcatcattttttttttcattttttatgcagatcttctgacccaaattaataattggtataattcttccccttaaatttatgactcctagtatatattctctactcaatggtattttagtaggagccgcataaccaataatttcattaacttgttctattggcaccgcatacctctcttttcctatatgaaataccacaaattgctcttcagtcattaatttccctccctgctacatctgcagcatattcttcataacataatatgaaaattggaaatgcattgttactgagcaaagaactaaaatatttaaaattatgttttgtgaatatattttttttatcttcaaaaaataaaatatatttgcagttcaatttagaaaggtggattactttaatgagaaaaatcagcattatattttttattttcttattatttaatataacaataacggcttctgccgatcagcctagaattcttagacagggtttttatacaacaaaagatttaaatttatcccctgatgctctgcatacaatacaaaatacctctcccactgaatatgtttctgtagtgctttttgattcaaatgaaattgttcaggaatttataagattagtccctaaatcagaaaaatatgctttaccacctatccaaattggatatgagataataataattggagatggtgaaattactatttcttagagtatatagattagtttactttagcaaaaaatataaaggtggtcatatctatgaaaaaatttactgtttcaatattatttttcttatttttgtcattaaatatttcaacaattcaggctctgtccatatctagagttttaaaaaaggggttctacacattagaagatttaaaactatctcctaatacaagttatactattcaaaatgattcttataatgagcgtgcttacatacttgtttttgattccgaacaaaattttatacagtctttacgattgagacctcaatcacagaaatataatttacttccgcttaaagatggatataaaatagttgtagttggaaatggagaagtgactatatcttaaaagagaataaatctacaagatttatttagtatttaatgattctacttttataattactataaattccaattaagattttgtacaatttataagtttaagactacaatcagcaaaacgcgatttacttctgcttaagagcagctatatatagtttaggctaatagcattaaaactcaccttatatcaaaaaagccactatataaataatgtcatttagttaactaaatgacatttccatacaagatgactttctcaatgatttttcaattgaattttatttaccttcttttaaaattgacgacatcactaatgctaaatcgttctttttttcattatctctaataaagtttgctactttatcatcttttgttattatttcaatatattcttttgcatcttcatttttgacattaaatgattttatattttctcttgatattttatctgtataagcaatatcagatatccctccccaaacagcatgagtaatagcctgtatatataaatttttaggagtaagaatcaatttaaaatcatttactactccacctgcaactccctgtgctagcaaattaaccaacgtatttgctactttacttgaagctttaatatctttgtaagaattaatagaacatagtatttcttcatcatttaatacacttgccatatttcgccctccaaattatatattttaattgaataaataattatctgcatcaaaatctattatccaattataccatataatagtaatatattcttattactaaattcttaatttttaataacttacttacattttctatactattcaaatgtataaggctcaaaaactagaattataagttttcaaaaatgttacttgcggaggctaaacagcatcaatgaattgaaaaatataggtggtcaatctcaactatattttttatcttacaaaaactttacttaaagatttctattgcttttctattataaattccgcatgatctcctatagcatgaatcattggaatgctaattactattttattatcttccatatagctataggctcctttctttggaatttcaatcacaccatctttctcgtgaaaatcagcatcttttaatatatttaaaagttcatcatcactaatgttttttataacagacttctgtgcttctattaatttatcatcctctgaaagcattttaacatcatctaacttttttaatttttctagtactccctgcgcattagcatagtctgaaagaccaactgttaaaccgttctctaaatctatattaaccgtataaaagattgaagttggatatgctgttcctttaatatttactagtccattaaaagctattgatatatatttattatttttagttttcacttcataatttacttccatgcttatatcattaatatttgtatcattctcaacatatatatttataatacttagggctgcattctttaaatctttatttatggattcaagctttactgcatcagcataatgttttacttgtgggtaattaatcttcacatgatctttactataaacttcatcaattatttcgtattgttttgattcatcacgtaaagatacttccatattaaaataattaattttattaacagctaaaacctctttttttattggattagtacacttcagattattaacatgaaaatttctcattaataagaaactaagtattgttatgccagttaataaaagtgccgatttcttcattttcatatgtatctcctttaattctttaatttgaatgttaattttattaattattttatcctcacgttatacaaataatgtaggccaaagcttaataataaaattactttcacttttttaatttttttattgattttatcggtcactatgataaaattatcgtaagaggtgaatttataatgttaggtgataaagtaaaactacttagaaaagagagaaaaattacacagcaaaagttagctgaagctattggtgtaagtcagtctactataggaatgatagaaggaaatagacaaggtgctagcaatgatacattaattaagttggcaaatactttaaatactactgttgattacttattgtctgataatatagaagagttagactttcctgataagagaattagtgaccctggatttggcgatgatgatataagaagaattgagagagctcgaagaaaaatggatcctaaaaacaaagaaaaaatgatgaaaattttaaggtctgcttttgatgagtacttcgacgattagatatacgcatataaaacgtatagttaacgatatttatataaaattaaatattagcaaatttcctataaacgtatttgaaataataggttctttcgataatataaaaatagtttcttatcatcgattcatgcttgatcacaatctaactaaagaagaaacttttgaaatattaacttctgacgaaggatgtactgattattttaaacctttaaataaatatataatttattataatgatttagattttaaatctgatgaacgaattagatggactttaactcatgaactaggtcatattttatgcagccactattcatctgataatacaaaaatatttgatgattacctatcagaatctgaatataaaattatggaggctgaagcaaattattttactggtcttttattatctaatccaataattcttcataagttgaatattagatcttctcatgacatagaaacgtactgttcaatatcttctgaagcggcacgttatagatacaaattttataagaagtggtgcgagaataatattttaactagttcagatagattcattatcagaaattttcaatcttatctaaatgctcaaaggcttgaatatttagaatttattagtttcatcaactcattttagctatattatcaaaactaaaattttcataatatagaatataatagttgcactactatttcgtaatttataagcaaaaaaggactatcgcactataaattaatgatatgctccctacatggtagacagtaaaaaactatcgatcataaaagggagcatattaaattttaatccattaataaaatgaccacttatttatggaaagtagataattatcattgagtttttttacgctacagataaatagtattaatttgtcttaaacttatctgttaattctttaagcgttgtagccatatcgctaaagctttgaactgatgctgtcatttcttcaattgaagctacttgttcttctgtagccgcagatattccttgagtttctcctgctacagcctcagaaagctgtgtaatatcactaatattaacaaatacttccttttcagttttattcatattatctatagcattacttacttcctgcatattagattcaacttcttgtatagatttaaatattaattgaaaatagctattagcttcatttactactttagatccatcattaacttcatttatgcctttattcataactaaagctacattttcagtttctttttgtatgccatttataagagcactaacctgccccgcagcttctccagattgttctgctaatttgcgaacctcatcagcaacaactgcaaatccttttccttgttctccggcacgtgctgcttctattgctgcatttaaagccaacagatttgtttgttctgagatgccctttattacttctgtaattttccctattgcttgtgaatgctctccaagcttgtctataactttagatgtatcgttaactgaaccttgaatattaaccatacttgagttaactttatggagtgcctcacttcctttctcagaatagctagacgcagtttgcacagccgaagaaacattatctgatttttcatttatatcttttattgcgctatctaaaatattcatattagaatttattttatctatcttagagcttactaacatagaaccttccgcaatttcattaacattttctgcagaatttgtagcaacttttgactgctgctcgcaaacatctgtcatctcactagatgctgatgaaactctctctgaatgttctttaatattatttattacctctcgtaagttaacagccattttttcaaatgctcttcctaaattacctatctcatcgttggattttatgtttatattattaactgttaaatctccatttgaaatcttatttgctgcatttaaaagtatatgcaatggtttagttgcataaccaactagaacaaaaactcctccacatgtaatgaacaatataactattcctattaaactagtgttaattaaagaatgtatgcttttttcaacagtaatacttttaggaatttcagcacaaataacccatcctgtctttttatcctgaacatagctcacaagcatacttttcccatctttaactacttcttcggaaccactctccccttttacacctttcttaataaattcgaaatcatttaaatctgtacgatcttctggcttgtctaatgtcttagtaggatgagctagcaatttgccgtctgaatctacgatataaacagttgcattatcctgcgaaagctctttaacaaaagaatttagcactggaagttcaatgtttccttgtaagattcccgttacaatcccgccctctttatctctaataggcgttgctaaaactgtgattaaacttccattatctttacttacaagaacttcagatacaacctcatcctgtcctttaagtgctgatttataaaaattacgatctgatatatccgatgatttagagtcatcgcttcttacaaactgaactccatctaatttagtaacagccgtaaatgataaatctggatatacttttgaactctcaactaaaatttgtttagatttttctgcatcataggaactaataataggatttctcgccatgctctttatcccatacatattcctctcaattagaccatttatcttttcatccacaatttgtgctcttttaaaattatcagctagtgcattttctatcgcaatcttttgtgaaaaaaacgaattaatgattgtgaatattattaaaggcacagaactcgcaagaagaagtgttaatgtcaacttccttttaatattcatgtttttcctcctaagttattatatatttctaaaatattagattagtactttaattaatattcgacaatatcagcgaaatacctcctataaaacaaacattttttattaattatagtaattagtccaacaaattccaatacatctatcttttttattgtgaattattccttgctttagtaatgtcctctaatcgaaaaatacattacctcccacaaaatggtggtaggtaatgtatttcactaagttctactatataaactatttttaataaatttgaaatgcagtattagaccaacttgtcctataactactatatgtagtctcagccagaactttataagtaccttttcctgtaattctatatgtcaaaataccaaaaaaagcctctccatatctatctgtcattcctttatatactgtcacaacacctttgggtgaagtaatactaaatttaacggctgctccttgaattgctttgccagaagtatctgtaaccttagctttaatatatattatatcacctgctaagtaataggctttatttgtagacacaaccgttcttgtccctaattttgaaggttgcgttgtcacaggctgacttacaactggttgagtagtaacaggttgcgcattagttggtattgttgaaattggctgtgtcaccgttgatgtttgtcctttaggtgcttgtattagcccataaccataccaactatcttttccgcttattcctaaatcaataacattttcattaagttttgcacgtaattgatttggagaaagccctggattagcctgctttaataatgctaaatctcctgtaacaaaaggtgctgacattgaagtaccgctcatagatacatatttattatttaaatatgtactaagaacattaacccctggcgccgctacttcaacagtatttcctgtagaggaaaacgaaggtcttttattattagaatcaattgccgctactgctataaccgaactatattttgctggataatctactgtatccgttgatccatctgatgtaccatcatttcctgctgccgcaacaactaaaatgcctttattataagccttgtccacttcttgttgcaatgcagttgatggtatggaactaccaagacttaagttaataatgtccattttatttgtaatacaccaatctattcctgcgattatatcagaaaggtatccagccccatcatttcctaatacttttatagcataaaggcttgcctcattagcaactccaacaattccataaccattatttttcgctcctattatacctgcaacgtgcgttccgtgcccattatcatctaaatatgatgttgtataagatgtgaaagctgcaccacctgcaactgatagatcctcatggttagctatcccagtatcaacaattccgatttttactccttttccagtataacttgaagaccatgctgtcggagcttggattttattcactccccagtctactgtttgagaatttgttttaactattatatcttgttctacggctaatacattgggatcatctttcaaatccttaatagctgtagtagaaacagatgctgatagaacgtttgcatttttgtattctcgtcttacatttcctctagcctttgaaactacatttttatcagctttatttttaaatacgacaattactcgttcatttgatgttgagactgatgttactaccgctgcattaacatttgctgtaaatccaaatgctactaataaaaaagtaactgctgaaataatttttttcatttatatacccctccttaaatttatctttcgtaaatgtgcttaattaagcttatcaccactcttttagaccttattccctcctcctataaattttatctgcacttctaaggaactgtactgataaacagatttgattaattttattataattccatataacaaaaaactattcaaacgaatagtgacagaatattactttatcttacattattcagtaactgtcatacatattctatgaatttagtccatataattttgcattccataatttcttatagtgtttgcttcatcttttaacataattatatcatagtggcatatcccctacaattcataacatacaaggattttgttccttataaagggtttacatgaatattattcacataaatacattactatcaaaataatttcatgaacttcaaagtagcttgttaattttttcatcagaatacattaaatctcctacgactattaaaactattttcattgcactttatggatactttaacctttatagccactttctaatatataaaaaggagcgttaactcgttttattctaaaataaaaacaggtagtttaattaaaaccacctgcttttatcttaaatttcagcaataataagccaattatatttaattttaaatattttattactaatttttactctctgatattatagtaatccaaatatcactcttatagtcttgtaaaaagctatctacttctttataaaatcgaatttcagtatgttaatatgaattttcaaaatacgtttaatttgtaatattcatttctgtgaacgattctaaaacataattagtattgtctatagttgtgacaattaacttgtcagttgagtttttaactttagcaacagtacctattagtatagataaacaatcctccactaaaatcggaatatcattcactactaccaactccatattatcacacttttccttcatccaattatttaagatagattctccttcagatgaattacaacctgcctccattaaatattctcctctcatatcccttttaaatatatcctattttttgaatctttatttagcttttattatttaattatcgtataacaatattattgttttaatattattatcagaatatttttgataaattccaataataaaacttttacacctaattatttgacactattttaacatattacttcatatgttaaaagaaaattaaattgataatatatattctatatatgtaaataagtaacatagaaaaactcaacttaatatgattatttcttataagtggctttcttcccacttattctagagacaatataaaaactaaattaaaaaaatacataccggctcatgcatttctttataacatatgaaataagcttatagtttattattaaatttatttactaattgaaactcatatttccttatataaaaacttccttactaccaatttaattagtatatttaataagacaaaaaagatagctattacagctatcttttatacttacctcgcaacgtcctactctgccacacagtctcccatgcagtaccatcggcactatagaccttaactttcctgttcggaatgggaaggagtgttacctctatgccatcatcacgagatcttcaatttgaaaaaactttgttctttcaaaattgcacatagtttctttaatgtatttacaacttgactatattggtcaagccctcgacctattagtatcagtcagctaaatatgttaccatacttacacctctgacctatcaaccttgtagtcttcaaggggtcttactagcttatgctatgggaaatctcatcttgaggtgggcttcacacttagatgctttcagcgtttatcccttcccgacttagctacccagctatgcttctggcgaaacaactggtacaccataggtcagtccatcccggtcctctcgtactaaggacagctcctctcaaatttcctacgcccgcgacggatagggaccgaactgtctcacgacgttctgaacccagctcgcgtgccgctttaatgggcgaacagcccaacccttgggacctacttcagccccaggatgcgacgagccgacatcgaggtgccaaacctccccgtcgatgtgaactcttgggggagatcagcctgttatccccgaggtagcttttatccgttgagcgatggccctcccacgaggtaccaccggatcactaagcccgactttcgtccctgctccacttgtaggtgtcgcagtcaggctcccttctgcctttacactcttcgaacgatttccgaccgttctgagggaacctttgggcgcctccgttacattttaggaggcgaccgccccagtcaaactgcccacctaacaatgtcctgtcaccagtttcatggcatccagttagaacttcaatactatcagggtggtatcccaacaacgactccaccaaggctgacgccctagtttcccagtctcccacctatcctgtacagacaataccgaaattcaatgctaagctacagtaaagctctacggggtctttccgtccaatcgcgggtagcgagcatcttcactcgcactacaacttcgccggatttgcagttgagacagtgcacaagtcattacgccattcgtgcgggtcagaacttacctgacaaggaatttcgctaccttaggaccgttatagttacggccgccgtttactggggcttaagttcacaccttcgcaaaactttgctaagtgttccccttaaccttccagcaccgggcaggcgtcagcccctatacatcagctttcgctttagcagagacctgtgtttttgttaaacagttgcttgtgcctattctctgcggcctgatttctcaggcaccccttctcccgaagttacggggtcaatttgcctagttccttaactgcaattcttccgtcggccttaggattctctcctcatctacctgtgtcggtttgcggtacgggcactacttctctctctagatgcttttcttggaagcatggaatcagatacttcggttccgtagaaccttccccatcacgcctcagaattgttggaacggatttgccaatcccaactccctaaacgcttagactagcatccaatagctagcacatcctatccttctccgtcacaccatcgataataacgattatagtggtattggaatatcaaccaattgtccatcgactacgcctttcggcctcgccttaggtcccgactaaccctgagaagacaaactttactcaggaaaccttagatattcggcctgtaggattctcgcctacatctcgctactaatgccaacattctcactcgtaatcagtccaccgctccttacggtacgacttcagcccaattacgacgctcctctaccgctcacgttatacacgtgaacccgtagcttcggtggtaagtttgagccccggacattttcggcgcaggatctcttgactagtgagctattacgcactcttttaatgagtggctgcttctaagccaacatcctagttgtcttagaaatcccacatccttttccacttaacttacactttgggaccttagctgacgatctgggctgtttcccttttgaccatggaacttatctttcatagtctgactgccggactgatagtatgtggcattcggagtttgataaggttcggtaagcgctatgccccctagcctattcagtgctctacctccactactcacattttccgacgctagccctaaagctatttcgaggagaaccagctatatccgagttcgattggaatttctccgctatccacagctcatcccatgctttttcaacagcaacgtggttcggtcctccacgaggttttaccctcgcttcaacctggccatggataggtcacccggtttcgggtctacagcatgcaactagtcgccctattaagactcggtttcccttcggctccgtaccttaagtacttaacctcgctacataccgtaactcgttggctcgttctacaaaaagcacatcattacacacataaggtgctctgatcggttgtaggcacatggtttcaggttctatttcactcccctcccggggttcttttcacctttccctcacggtactgcttcactatcggtcatcaggtagtatttagccttgggaggtggtcctccctgcttcccacaaggtttcacgtgtctcgtggtactctggtgcagaactgattatcatagttttcacttacgggactattacccactatggtccaactttccagttgtgttcaattaactatgatttctcgttatgttctgtccgcaaccccagagataaatctctggtttgggctttttccttttcgctcgccgctactaagaaaatcgatttttctttctcttcctccaggtacttagatgtttcagttccctgggtataccttcataaagctatgtattcactttatgatacatggggtttcccatgtgagtttcctcattcggaaatcttcggatctctgactatgtgcgtctacccgaagcttatcgcagcttatcgcgtccttcatcggctcctgatgccaaggcattcaccatgcgccctttgtagcttgacctaattattagtcatatcacaaagaatatttattcttggctttgttgtattttatatatacattaaatctatgtgcaattttcaaagaacatctgcttgcttattaacttcaattgtttcatcagctccaaattttactcatttacgtacgtgaagtacgcttcatttcataaaattttcgcttcttcgcacttgttactactaagctacgcattttgaaagacttagtctttcaaaattgaacagaacaaatacttaagtaacctttgagcaagtattttatattttgatacataataatgtatctgtactagtcagacatcatgctgatctagatttctccatagaaaggaggtgatccagccgcaggttctcctacggctaccttgttacgacttcaccccaatcgctgaccctaccttaggtcgctgccccgcttacgcgttagctcacgaactttgggtattgccaactctcatggtgtgacgggcggtgtgtacaaggcccgggaacgtattcaccgcgacattctgattcgcgattactagcaactccagcttcatgtaggcgagtttcagcctacaatccgaactgagactggttttaaagtttggctccacctcgcggtttagcatctctctgtaccagccattgtagcacgtgtgtagccctagacataaggggcatgatgatttgacgtcatccccaccttcctcccggttaacccgggcagtctcgctagagtgctcaactaaatggtagcaactaacaataagggttgcgctcgttgcgggacttaacccaacatctcacgacacgagctgacgacaaccatgcaccacctgtcttcctgccccgaagggcttccccgattaagggtaattcaggagatgtcaagtctaggtaaggttcttcgcgttgcttcgaattaaaccacatgctccgctgcttgtgcgggcccccgtcaattcctttgagttttaatcttgcgaccgtactccccaggcggaatacttaatgcgttagcggcggcacagaggtcatgacaacccctacacctagtattcatcgtttacggcgtggactaccagggtatctaatcctgtttgctccccacgctttcgagcctcagtgtcagttacagtccagaaagtcgccttcgccactggtattcttcctaatctctacgcatttcaccgctacactaggaattctactttcctctcctgcactctagatatccagtttggaatgcagcacccaggttaagcccgagtatttcacatcccacttaaatatccacctacgctccctttacgcccagtaaatccggacaacgcttgccacctacgtattaccgcggctgctggcacgtagttagccgtggcttcctcctcaggtaccgtcattatcgtccctgaagacagagctttacaatccgaagaccgtcatcactcacgcggcgttgctgcatcagggtttcccccattgtgcaatattccccactgctgcctcccgtaggagtctgggccgtgtctcagtcccaatgtggccgatcaccctctcaggtcggctacgcatcgtcgccttggtgagccgttacctcaccaactagctaatgcgacgcgggtccatctcatagcggattactcctttaattgctatgccatgcgacactacaatcttatgcggtattaatcttcctttcgaaaggctattcccctctatgaggcaggttacccacgtgttactcacccgtccgccgctaatctattcccgaaggaatttcatcgctcgacttgcatgtgttaagcacgccgccagcgttcgtcctgagccaggatcaaactctcaattaaaagtttaatcttagcttactcaaataaaaattgctggtttacttaaatgtatttatcttattctgttcaattttcaaagaccaatttttctttctaaagcttgttgttatagggctttacaagtatctgtcgtttctgacagcttactcagtatatcaccgctttcaaagcttgtcaacaacttttcaaaaaactttttgaacttcattttcattagttctattagctttaagttattaatttcacatctcttagcgacgtgttttatcttaacacctctggcatatattaatttcctatcttctcacctttttgtgaagttattctgttttttcaccattattcgccattatgctaactaatacatatattgatacactagaaaccgttgtatacattgaatattctgaagtaaatatttaaaaatccaacctatgtacttttgatattttaaaaatatgaaaccttaatttataaattctttcaattcactttatatactattcagaaacatttgcatataaggttatatctaaaataaaataataaaaaaattgatgatatcaaacattttatatcatcaatttttattaaactatatttattatttataaatgtatatataaaacctattctctaacccacaatctcatttagactttcctctttgaaataaagtcatacccacatttttaaaactcacttgttaatacttattgaaacctccattatatactacaaatcctgatttagtatttgcgcctttagacgtattataaactacactcagcttaccatttttacgatacagtggtgtcgcggtctcaccaggagatagtgatcctattacatttccattagaatcataaacattttccgatgtagaaccatttttccaagctccatcattaaaatatttaattatatttgtagcatttgtaacatatcctgtccttactccattaggtgttggatattctatcaaagccaattgagttgaataactaacatccaatactgttattttatccccatcatcaactctacgaccagaaataatattcccactcgaatctcttacgtaaagaaaatctcctgatacttgagcattatttggataagtaaagccactttgtgttggatcactcggctcagatggattaccctgtagatatatgaatccaagaaaattcgcagatctgctcttaaatgctgatactgtctgattttcctctgcgccatcatatgccttacttacatgatagttagcttcgttaaagtatactgtgtcaccagaaacactttcaataaatacaacatgccccgcactgccattcccgaatacggctatggaattagcggctggtgtttgccctttcggataagtagtttcattccaccattgttttgcatttccataaaactgagagtttaactttattcctaatttctcatatgcacgtccccatacaaaccatgtacattgtcctttgtaaccactctgagtaaatatgttttcactgttataagcactgcttgatatatttggtgaagttgcagcgaaaacaatgttaggactttgtcccaaaagcattaataatgatacagccaaaatcatcacttttctaagttgttttttcatctcacctctcccctcttaattactagtattattaacatcaccatcagctcaatacacttgttaataacactctttaccacatttatatattctcatattactaaacctaaataaatagtgtttcctctaaacatacaatatgaagtattaaaagcaactcaataaattatttgcttgattattaagtaattattcttttcattccaaaatttgtacgttttattccaataacattgaaattttatccaatatgctttataaagatattattcactaaataatctagagaggttaaaatgataaaattaatatcaacttttataacgaggtacttagaagaaaatagctcttctttaattaaaacagatttacttaaaattcaatatacattagaagtgattttaggtaatttatttgattttgtagttatattattaatatttctaggcttgaataaagtccctatacttttactatcttatgttattttaatttcaattaggccctttatgggaggtactcattgtaaaacttttatttcatgtttacttgttactataatgtacttcatagcagtaatgctttttactacactggctccaaaattaagcaatagcttttatataattttttttacaatatcttttattatagtcgcagcttatgcgccatgccgtaataaaaaaagacctgtaaaaaataaagcgacattaaaaataatttctttaatatcgctaactttttggattgtagtattctttaccctgtcaaatgtgcaaatatgtaattgcatatttgcaagtatattcatacaaatacttcaaataattattattaatacgaaaggagtggtttcaaatgcaaaaatctataaacattttttcagctatacttcttaagttatttaacttagcatctaaatcaagctgtgcaggcgtatggggtgaaccagattatcctgaagaattattgaaataaatatcaaaaacaatttcattacattctatattaattttaatatatcccttatgtaaattaactatttgttgtacattatataaaccataacctcttgtatctgcatttttagtagaatagcctcttgtaaaaatctcatctaagttaatgtcactaggatttactacttgattcttaactattagatgagattctttattttcattaaaaatctttatttcaatacattttattgaacaattcttttttgtcacctcatcaaaagcattatttagcaaattatttaatatattagaaaattcattatagcttaatatatgatctaaaacattattttctatttcatatttaaaagcaatattatgcttttttgccctgcacatgtttctatatattatagatttaacaactacattatcaatatatataagttcatttattttactatcatatatatcttcgtctttcatataggttctaatagcttcctttaaatctttttcacttaaaacttccaccattccccttattgaatttttataattaacaaaatcatgctgtctctgttttatttcttgaactatttcatcgataacagcattatactcatttgaaatttttaatgattctttttctcttgtaaccttaataaaatacaagtatatcaaaacttgagataaagccaatatgccaaatattaaagatgaaagaaataaattgtttaaaattactatgttatcataataccaactaatcttaaaaagcatagcatatatactgcatattagaatagaataaataaaaactacattatccttattctcaagaataaaattttcatttaataaatttatctttgaaaatataatttctcctaccaatattattccttccacacaaatttccttgactatattatcgtaaataaacttatcaataagggccgcaaatattaattctaaactcattactgcaatcaacactaaaaaaaatcctagtataacttgtttaaaatctgccttatatataattttaatacttataataactgctatatattctaacataaagtttaattgtaacatttcaatacctgtaaccaaacttgaagcaatcaatacacttaaagccaatttcaatatatcattatttttcttggttaatgttgcccataaataaattatattaaatgtattcatcccatttataatcgctgaacttaacatattatcacttttccttttttaaattcagacataatgctatttttaaacttgtatcctaaaaatgctgtcttactacattcattaaaatatacttcactaagtttaacatctagtttttctattttgtatatataattcgtgtttattgcaaaagctctatggctttgaactatataattgcagtcaattagctgcaatatttttttcaaacttatgttatatgcagtgtaaactccattgtaagtattaatatcacagtttttaccatcaacttctataaatataatatcatttacctttattccaacgtacacgccattttttaaagtaattacaatttctttatctttttcctcgctataattatcaactttgttattcaaatcacttgtttcattaagaataatcttattcaacatagcttgtacatcatttttatcatatggttttacaatataatcatagcaatgagtttgtttaaatgcttgggttatatattccatgtgtgttgtcaaaaaaatgatttgcctaaattcgtatttagatatacttctaatcttcatagcaagatccaatcctgaagattgttttaaactaatgtctattaaaaacatattaatatcattatttaaaattatttctaatgctgacatctcgctatcagcctcataaatttttacaaagtcacatacagataatatcattctctttaaaatgtctctttgtatagaatcatcctctactataataatagaatacaaaagtaccacgctccaatccatatacaatctaaaaaatatgtcaataatactgtctcatataatcatgagttaaaggctaattacatttaatcttattttatattagattatcaaaacgcctctacctatataatacaatattatataattatatacaattatcccacttttgtgtaatttttatttatcattctttaaagacagtgataaaacgcgctgtatagactatttaatctaatgcagcacgtttcaattataattattcttattaaatttttttaaaattaattacataaatatagctattttttcggaaagaaacatttctaattccccatttccttcatactataatctgcatatgaagcatactcagttttaggatatttatcttttacctgcctaaaatatataagagcatttgaataatcatttatctctttatagcatgtccctatttgatacatcaaccaaggcataatatctatatcagaatcgatttgtgaaatcatttttaatttaggaagtgcttccgcatattttttttgtttatatagcttatttccatcattgtatataggccagagtccacttatttttaaatcttgccataatttatcaaacttcgctttcgtatcattatcgagattttcgttcttcacatttattaaatcctcagcagcaatttcatattttccgtctctaattgatttctcagcctcatctaacatgcccaaaatattattcttatagctatcgctttttactttctgatcttctgaatctattttagctttctcactattttcaagattcaccatattctcttctaacgaatcatctactttgttctgatctttatcgagttcctcttgctttactattagtttattatttatactaagcttatgtaaaaattcttgagtttcaataggaaccttcgctattgctatctgaataaactttggataaaaataattcattacaataccgcccataatgattactgtacttaatataaccataattatttttcctgtcgaacgctttggttttttagagtactcattccatatatcactattaatatgatttataacatccatattatttatatttcttcctctggatgattttatttttaggctttgtatatagtcatttgctaagctatcatatatagcgtattttttgagtttcttaaagatcttttctgcatttctatattgcttcatactaacatagcacaatccaataagcttaattgcatctgaaaaccccttattataggataaagctttttttaaatcatttacagccaactcaaagttgctcttttttatttctcctattgctgaattatatagaataatggatttcttaatgtcatcatcgatcttatatctattcaattccatttcctttatattgattggatttatttttttaatctccatctcaaaattaaccaaataattacctcctaaaatattacacaataatacactaatgttcaaacagtaatatcttcccattaaaaccagaatagctttacatttgtatttaaaatttgatttatttctatgtataaatcttagcaaattatgtaatataattcaatataaagtcttactggcaaaatattttctaaaatatttttaagcgtacacaaaattattgaatatcttcattttaaaagtagtataaaaaacttaagactatgtataagtttaaaacaattatctcttatacatagccttttttcgcttccaaataatattttattataaataatttccttaatttaaattttgcccgtttccaattcgtattccttgaggaaatttaaacacctcatacggatcatatttcaatttaacttctcttaatttttctaaattttctccataatactctttttcatactcatcaatatcttcgcacggaaaattaatatatgaacctgttgtgatactatttatgtatttaagcttttctttaacccattctatattcataggcgcatactcagcctcttcccaaacagattgaaaccccattataaatttcgcatctctatagtaaaaagctgtatcatttttatctttttccataattgctccacctaatccatatagggaaacagctgcatatactgcacctttagccctctcttcaacaagttctataatttttttcatttcacttctactataatccttatatacgaatcttcctgctgatttatatttttcatatagaggatgaccatcttgaatccttctatttacatctaaaactgaaatataattaaaatcaaatactccttttttagaaatattcttaaagtcgcctaaaattacttctgcctcttctctggaaccatatactattcctgtaattctgactcctcttccttttatttctgaattatatatccccatctttaaattaactcttttatctaaactcatatataaatgtgtccaaatctcaaatatatctaatatctcatgatcatcagcacctatataatcgatatctattaaagtcgccatcttaattttttcaggaagtttaaatatcatgctagtaactactccaaaatttcctccaccagcacctcttaaagcccaaaacaagtctgtattatatttatctgtagcaactattctttcccccttatagtctatcaattcaatttcaagtaagttatcagatgctaatccaagcaatctatttgaataaccccatccgccacctaaagttagtcccgaaactccaaccgttggacatcctcctcctggaaatggatagcccagttctcccaaaacctcgtaaagttccctattcctaactccgccttgtatctttactattcctatttcttcatctacactaattgcattcattttgctaatatcaataaccaaaacatcatttcctgttgaatatccctcatagtgatgtctgcctgaccttattctaatttctactgaatgcaatttggcccaagttattgcattgatgatatcatcattagtatggcaatatacaattgctaatggatatttttctatagccctattccaagcctttcgttcttcttcataactaaattcctcttttgtaatgatatctcccgttaatcctctataatcaaaatctatcaagtctatcaccttctacttttctactaattatttcatctactcccataataccatattatattttttataataagcgtattttatctaataaaatatttttttacacaatcttttgatgtaaaaataaaatttattaaaacttgttaagaaactgtgaactttatttttttattgaatattataattttcccatgtcaaatatatagctaatcataaaggagagatttattatggataaagaaagagcacaggaaattgtttcatcatcagtaatgccaaatgtaacacttaatggaactccaatttacatcgaaagcgtaaatactaatacagaaactgctaatatccattttttaaaaatccaaaaaattcacgcgaagtgcctttaactagtttacaagaacataataaaaaatagtattaaatataaaattataaaaatgccttataattttacatttaaatttcaattcttaatgactacaattttgtagtcattaagtctacatattgcacgcaaaaacttttgactaatcactatatcactagaaacttttttaaaatttctagtgaattattttatcaatgaaaatttatatagcactaccatgaatttcatagtatcaaatacttcctttaggatatgctaatatcataaaggatataacagttaagcaaacaaatatgttcaaaaaacaatatatttgtttatcagaatttaatacaagtcaaaagacttgtattaacattagatgagattttatatggttaggaaaagtcttattatagtagattaattttattataataggattccaacttatcttataaagtcaagctaagattatatttggtagtgtaataatcatatatagtcaaaagattatatatggtcgtgtaagtatcttatttagtcgaacaaaatattaatataggtattgcactgtttaattatggtcgaaagattataattagatactaagttatatatattagtgtgagttatactgctatattctttatttaatggccataagtaaatttacttatggcttttatttctactcatttcctataacaaatccttatttatattctgaataactacaataaaatttttccatatacaacaaaaatgtacatgtgaggaagttgcttttagtaaactttcacatgtacctttagtttatattggaatatttgcaactaataaagctcatacaaattattttgaaaaatatatcagctttttatatctgcctcagaattttctttaaatacaattttatttgaattcaattcagtttcatcatatctatatggctttttcttaaatacctttattactttaccaaatagacctcctatcacagccaaaacaaatatccataccttcttaaatattattagtattttagcaaacaaacctatcttagatgctgttcctccaacaattagtgctgctaatcctgcttctgctaccttatcgccttttatgtaatctgagtatctttttccttctttataagcataattcttaataatattttccagtttaggtttaaccgccaacatttcgtccttgcttgcaaccagtgtgacttcagtcactccaccacgccctaaaactcttacattataattaactatctgttcgccgctactattacataatactgaccatactaaattattggtatttggatcataatgtggtttttcatcccatccaattatatctaatgtagattttccattcttcattctttccttattatcctcttcagttccattttttatatcggacaataactgatcagcatttatttttcctgcatcattgtctttgacatatcccatattatcaaattcaaataaaacataccaattttcattattatcttttgataaaactattccctgctccatgccggtaactgaattatccatttctttcattaattcctttgcatcttttccattcgcaaaaacgtattcactaggcaaatctaactttgctaagtcagttcctacatcaacagtctttggcccttcaatccaatttatttccgatgtatttgttgagtcattagcatatgaaataactggaataatagtaaatatagttaaagcggctaatgttcttaatatactttttaacatttttatccccctatgtattaagttacatttattattctaaagttattttcatgtgttgtatattatacttttgtatacttttttatactttttcagttctaaataatatgaaaattatttaactgaatacgctaagataattcagattacttttaataactaaagtttatattttagaagcagcttaagattaataaaaaactattcccttttgtattacataatcaaaatatccaatatttacaatacaaattccttctcttaatttcgtatatttaattaagttatgctcatactaactttgaatgatttatataggaggtgttaaatatgccaggaaaagctaaacaatatgttgatcaaagcgtatcttcatgcaaagatactattagctcattacaacaagctcttagctctgcagaaaaacaagataataaaaataaaattcaacaagcaataaattctcttaattctgcatgccaacaattatctcagtatcaagactaattcatacttagatatattgttaacaatataataaaccactttattctgattaatctagaataaagtggtttattatcttttatcttaaatatttcttaaattcatactttaaaaatgtgagcatacgtattaaaaacattcatcacatcaaaatctacaatcatttaacatagttatttgagtgttaaaatcttatgctaaatttcttttaacaacttcttttgtttccgcttttgatttaatccccttatggatcaaccaaagcataataaaccatactggcgttacaaatagagccacacgagtttcattattaaatgctaatgtaattataacaaaagctaaaaacgctagaattatataattcatcattgggtaaagtggcatcttgaatttgttcgaagctgcaagttctggattagttttacgatatttcaaatggcaaacaacaataattgcccaaataaagataaaacaaaatgttgatatacttgtaattagaacaaatactccttctggcataatgtaatttaaaataactgaaatcaagataataattgctgagaagattgtagcattagcaggtacttgattagaagttaatttattcattgactctggtgcattaccttcttttgcaagagagtaaaccatacggcttgtgctaaaaataccgctgttacatgcagaagcagctgatgttaatacaacgaaatttacaatactcgctgccgctgcaattcctactgctgaaaacacttgtacaaatggacttttatctggattaattgaagtccatggatatatgctcataataataaatagcgctccaacatagaaaataataattctaattggaatattattaatagcctttggaataactcgttctggatcttctgtttcaccagccgtaagtcctactaactcgattccggtaaaagcaaatacaaccatttggaacgaaagaataaatccagttgcccccttcgggaacaatcctccatgactccaaagatttgtgaagctagctgcgccagcatctgtagaaaatcctttaataaccataaatataccgattatgattagcgctaaaattgcaacaactttaattaaagcaaaccagaactccatttcgccgaataactttactgctgtaaggttcataatcaataaaactataagaattataagacttggaacccattgagctacattcgggaaccagtattgtatataaagacctgcagcagttacatctgccatcgcaagtgaaatccaacagaaccagtaggtccatccagtaataaatgctgctctctctcctaaataatcatatacaaagtctacaaatgaatgatagtttaaattagaaagtaataattccccaagggcacgcataataaaaaaacaaattattcctgttatcatatacgcaaacaatatagatggtcccgctaagtgaatagaccttcctgaaccaaggaataatccagtaccgattgctcctccaattgcgagtaattggacatgacgattttttagtcctcttgataagttttgattttctgattttaattgatccattttatccctccatcttagttaaaaggcatgtactaaaaagccctttactaatataaatattttgtgatttgagatataaatgggaatagataagatctaaatgaagtaatctataatatattactttgataagatatgttatctgtcccctgtccttttacctgagagtttcgcctttacagctttctccttcggtgctcttttcgagtctctccaaggtttcatccaatagcggtcatctctaattaaataggtacctgaaagatttacttcttcggtgaatgaccatagccattactctcccgctatcttcatctgaacttttagattttactgttatatagtaatacatttttaataaagttgcaacatttttttcattttaatcagaattcttaagtatttttatcataattttaaaacaaccacaaaaagaaccctatttctagagtccctaattatttacccatttgctttttttgttttatccatcaattcctctgttgctgcttctttctaaaatacgattttttattttcaatacctaagagtttcttgtttcttaataagattttactacccttactctctgtttcttatcaatctatttgcatacatttagttcatatttcatattgatgatcaccttaaattctactatttttatataactaactacacaaaatcaatttttattttccattgaatttagaaattatataacaaaaagtctagtataaaaaaatactaaactttttaaatattttcacttatataaacgctaatttgatattttatgtatcactaaatattttttcttaactctcattattcatcttcttttatataaaaatgatttggatatcgctcttttttaagttccttttcagtccctaattcacacgccatggtgaaatagtcaaccttgtaattaatatgttccatatatttatttaattcatctatctttttttgaacattttccctgtgctttaatattaactccaaccttttatataatgtaccatcaccttggctatttaaaataacaaattcttttatctgctcaataggcatattcgtgttctttagacaattaattactgctatccactctagatttgactcatcataatatctatgtctattttcggcccttttaatattaggcaataatccttcagattcataatatctcaaggtagatggtgttagtcctgtaatcctagctgcttcttgtatagaatatttcatagtttctctccttatactagaaatttctaagatacattatacgccaaaattactatttttagaatagaaagaaaaagaaaatgtatacataaaacttattttttatccctagcctagttagcacttatttcatcaatcatcattaactcttcatccgtgaatccaatcttatgaactattcccacattttcaataatttgagacggttttgatgctccaataagtacacttgttacttctgaatcttttagtacccagctaagcgccatttgagcaagagtttgccctctatttaaagcaatattgtttaatctcctaatttgctctaacttcttctctgtcaatatatcttgctttaaaaatcttccatccacctttatccggctatcgtctggaattccacttaaatacttatctgttaatgtcccttgggctaatggactaaacgctataattccttttccgttttcttttgctgctcttttaagtccattattttcaatagttctatcaaatatagaatatctattttgattaattacaaatggacattttaattcatttaaaatcgcagctgccttttccattgtctctccattataatttgaaattcctgcgtaaagtgcttttccactttttacagctgtatcaagagccatcatagattcttctaatggagtatcgggatccattcgatggtgatagaatatatctacatattccaatcccatacgctttaagctctggtccaaactcgctaatatatatttacggcttccaaagtctccataaggtccttcccacatcttataacctgcttttgtactaattaataattcatcacgatatgtcgctaaatcgtctcttaaaatacgtccaaaattttcttctgcacttcccggaactggcccatagttatttgccaaatcaaaatgggttattccattatcaaaagcagtaaaacataattctttcatgttattataatctgcattgcttccaaaattatgccaaagaccaaaggatatcataggaagctttaaaccactttccccacatttactatacttcatctcattatatctattttttgatgcttgatatttcattctctcaactcctttgtttttataactttactttaacacttaaagttaactttaagtcaatatcacatttttagattatttaaatatatattatgcaaaaaataaacaacataaatcaggactaccataaatatttaattgcttgcattgcataatatatattttcatttatgttggattatatacctaattagcacttggataaactgaagtgtcccatgaatgatctgcacttatttcttggtctgttaagttataatagtcgtattgtataacatcaccgtaattagatacaggatcatcccacgtacagtccacatgacgccatttgttatttatataaaccaagttccatgcatgggcctgtccatcagcagtcccctctacaaccattgatttaattcctgcaacagtaaacattttttgagccaaaagagaatacccctcgcagactccagtatgtttaattaaagtattataaggatcatatatagttaaagattgatcatattttgtattatttattatccaatcatgtatcgcacgttctttctctggctgactcatgctatctggagcaatctgtgcgactatggatctcactttcgaatccaaatctgcttccattcctgcagtcattttataattgcatttaacctgtattccaatattacctgatctataacttgtcatggttacatcgtaatcagatacattaaacatttcataagagttagtaatttttaacttacttatctcatctttaataatattttctaggttgttaatatccactccactacttggacactctatatagaatgatggattttgaatactgacattctttaatatctcttgtcctattaatgtatttacagagtcaatccacactcctctggaattcaagtaatatccatcaatagtagtgttctgtgccatatatccattttggtagaaataataccaaaagccatctatctttctccatccaatggcatacgaattaccttctgtataccaccagcctttataattagacttccactctgccgaaactcctattggggttagcgctgtgatcgaagctgcaaccaatgtacaaataatgatatttcttaatcttagacttttcattttattcctcccttcaatacttataacataattgtatattacttcatctttttttcaaatatgttacaaaacagttttacacaaaaaatctagtcattgtatttatattttactatataggtttaaatgtttatttttcaatattataaaattgcaattaaataatgttaattagaaaatagagctagtattctaacatctatgatactagctctatttttatgtttatttatttttagatatatcccgaatatttaaaaatcatgcatttcaaattcccaatatataatttctataacattcatatgcacattaagaatatgtacatagttatatgattattttagtaccccaaaattaatctttgcctgcactctgatctttgatatgatgacatctttaatatattttcttccatccattttcgctgttcataagaaaatctttttccaaagaataacataaattgattgtcataattatctcctactaatccataggtagattgagtaaatttaataaacccaagagtctctagcaatgctgtatcatgaagataaattgatttctcctgatcaaacatttctaatcccaattctttttctaacctggatgctaaaagattatgtttagattcaccacattcataaaattttccatctcttgataaccaaccacatatacctgtttcactcattcacttaataggatagatacttatgatttagcttgtatcttcctattttacacctcactctcttgtataataatctgaatatattattgctaatttttatgtttaagcagcgttttcattctgtaaaccaagaaaattcagcatattagtataaaaaactttttctttaaatttaatatatttcataaattctatatttccacaaaaatattcaaattcctctatttcaaatggtgtaataattcatgaaattaatggattaagtttaccaatcaatcatataaatggcatgcaataaaatgatcaccttcaatttctttaaaaacaggaatttcatttttgcatcgctcatatgcatatacgcagcgattacaaaatttacacccattttctctatctttcaatgttatctctgattcttttacactaagcctctgcttcctcaattttggatgactaaccggcatagattcaagtaacatttttgtatatggatgcatcggattatcaaataaatcttttttttcagccagctcaacaatgttccctaaatacataactgcaattctatcacagaaatattttacaacgcctaagtcatgagatataaacagaaaagttagtagatatcgtgtttttaattcattcagtaaatttataatctgtgcttgaatagaaacatctaatgcagctactggttcgtctgcaaccacaaatttaggctgaacagccaaagctctagcaattcctattcgttgacgttgaccaccactaaattcatgaggatatcgatttatagcttctttatccataccacaaatccttaagtattcttctgctatattaaatgcatctttcccatgtatcaatctatgtttcttaattccttctgctataatttgtccaactttcattcttttatctaaactagcaaatggatcttgaaaaataatctgcatatcttttcttaatctgtacatttccttgttactaattgatttcttattttcgatatcaaataaagtcttatcttcaaatattacttttccaccatcagcatctattaatttcaaaatagttctggctgttgtagactttccacatcctgattctcctaccaacgcaaaacattctcccttttttattgagaatgaaatatcatttaccgcatctaaaacaatcttttctcttcccaaaaagcttttttcaattacatatttctttctaatccgatctacttctaaaatagtgtcaatcaaaatcctttccctcctcatataaccaacatgctactttatgattatctctaatattaaataatggtggaatctcgctttcgcattttacacaaaactttttagaacatctattgctaaatcggcaccctgagggcatatctgataaagatggcactatcccttcaatactttttagaggttttccactttcacacctatgcggttgtgactccaataatccaagagtataaggatgtctagcattatcgaataactcatatacattacattgctcaaccacctttcctccgtacaataccataacttcatcacagacttcagcaactaccgataaatcatgggtaataaacaaaatagatgttttaactttattatttaattcttttaatagaaatagaatttgagcctgaatagttacatctagcgctgttgtaggttcatctgcgattaatatttctggttcacagcttagagccattgcaatcattactctctggcgcatccctccactcaagttgtgtggataagaattataaactttttctggatttggaatatggactgctctaagaatctcaattaccttctccttaagcgctctcccatacaaacttttatgtatctttagtggctctgctatttgccttcctattttaaatactggatttagtgaagtcattggttcctgaaatatcatagaaatttcatttccacgaatatattcaaattgtttttctgtaaacttactcaaatcatttccattaaataatatttctccattttcaatattacttatcttatctggtaacaatcccatgatagataaagctaaagtactcttaccacacccagattccccgataattcctagtattctgcccttttcaaaagcaaagcttacatcatctacagctattactttatcttttccttccccgaaactaacagatagattattaatacagagaatttgtttatccatatttgcccccccctatatattcattttgggatcaagagcatccctaagtccatcccctacaaaattaattgatagaactgataagaataccaatactcctgcaggaatccaaagccaccattcatattgcaatacacgcatactttgagctgctgataatatattcccccagcttggctcgggctgttttactcctaatcctaagaagcttaaaccagcttccattaaaatcccttgtgcaacagctaacgtagcattcactataaccggtgataatgtattaggtagcaaatgattaataataatctcaaaactgttaagccccatagctcgtgcagcttcaataaattcactttgcttaatagaaagaatttcagctcttacaattctagcaactcccgtccattgtaaaagacctataatcaaaattacgttccaaacactaggtccagctagcgcagcaactgtaattgctatcacaaagaaaggaaaacacataattgtatcgactatacgcatgattgcattatcaatccagcctccataaaatccgctgatgcagcctaacgtaactcctattagcatctgcaaaacagttgcacttactgcaatccccaatgaaatgcgtccaccatataataatctattaaatacatctcttccaagttcatctgttccaaataaatgttttaaacttggttgactttctatattcattaaatctatcgtatctctcccataacctgacaaaaatggtgcaaaaatcgctgctaatacaaatataattaaaagacaaaaaccaattgcggccagcttattctttagaaacctagttaaaatcacacgttttaacacacctttcctcccttaatcaaattctatacgtttatctacaactgcataaagtatatctgccaataaattcgtaaataaacttattattgcaaccatcataactatgcccataataagtggataatccctactaataacagcattgtagttcagccttccaatccctggccaaacaaaaattgtctccgtaagaagagcgcctgataataatgatggtatctgcatagttactactgtaattaaagtcaataattcattttttaaggcatgctggtatataacattcctcttcctaactccttttgaacgtgctgtacgtatataatctgtttttaaaatttcaatcatatcagaacgtgtataacgcattaaactagccgtattcattagtgcaagaactatcatcggcaataacatatgctttgcaacatctattacaaatggtaagccagttaaattaacgcctgtagtcaccatacccgatataggaagccatcctagatttacagaaaacactttaatcaaaatcataccaaagaaaaaggatggaatagataatcctataaatgcaaatactgtgacaatgtaatcagttttagtaaactgttttgtggcgcttataactccacatggaatcgctatcaaaatactaagaatcattgagcatatagataagataactgtattgcccagccggctgcctataacatttagaaccggctgtttaaattgaatagaatatccaagattcccctgtaaagcttgcattagccacttaaaatactgaattaatatgggatcattgtatcccaattgttccaacattttttctttcatttcttgtgaaagattaggatccatcatagatgaaaatggatctcctggttgcagctttacaagcataaaaacaattatagaaattccaattaatacaggtattgtttgtattaaacgtctaaatacatatttttgcagaacaatcacctcctcctataaaatcatatcggttagggcttttaccctaaccaatacatcaaatttttaatttttatagttcacttctatatcactcttgccagtaacttactattttgaaatcgtccagttttgtatgtctggaaatacagaatatgctgagtacttatatccttgcaatttgggattatgagcacgaatagcattttgtgaatataaaaatacatatggtgcttcatcattcaataattgtccccattttgcataaacttctttacgttcattacgatcaatagtagttgcagccttttctataaattcatcacttttagcatttataaaattcgaaaaattaaattgagaattatttgcaatgcttgaagaccaataacgatcggcatcacctggatcaacttctaaggtaaatcctaataatcccatgtcataatctccttgtcctttagtttttgccatagcagaagcaacatccattgtactgatatttactataatacctacatcctttaaattttgctgaataattggagcactttgttcacgaaccttatttcctgtaggaaccattaaatccacttcaaatttcttaccatccttttcaagaactccattattttcaatccatccagcttcttttaataattctttagccttatctgcattataatcataggtattaagtcctgacttaggataagcccatccagctagagatataggtgcatttattacttgtccatgttcacctagcaaactatcaactatgccttttctgtttatcgcataagtgattgcttgacgtactcttttatctttaaagaaatctctattgctattcatagtcataaattgataattcgcacttggtttctcctctatttttatacctgcatcttttaacatctttaaatcttcttcttttgtgcttgaaagttcaacaatatcaagatccccttttgctaactccgaaagctctgtttctgtattagcaaccttaaaaataaatttatctattttgggagctcctccaaaataactatcgtttttagctaattcaacatattggtctggtttaaaatctataagcttatatggtccggttcctacaggcttattaagcaaatcactttgcttatcccaatcagcaacatttactttactccaaatatgcttcggaataattccacgttgtgaaaaatttgataatgctggcgcataaactttagaatatgtaaagcttatggtatatttatcaataaccttaattccacttatagaatctgctttaccatcatgataatcctgcgcaccaactattttggaaatttcattgaatcttgatcctgtgtacttttgatcagccatgctagtaaatgtaaatgcaacatcatctgctgtaaaatcttctccatcatgccatttgacatcttttcttaaattgaatgtcacagtaagattatcacctgaaaattcatatttatctgcaagtccaggcttaaaatcattattctcatccaataaaatcaatggtgaatataccaagctatttacattattatcatacgttgtatttgataataatgggctaaacaaacctttaggtgaagattctacagcatatcttaatacagattcacctcttgatgattgattatcggctgatgaattagttggtatttctgcagatgtacttccacaaccgtttaatagcaatatagataatagcattgaaagcataccagccaatattttattttttctccgaatcataaatattcctctctttcatagcttgattttgattcatataacttaaagtattgatattattaaaatattttccaacgcaaattctagaaatatatttttcaaatttcaattcatagtattttaatatgattacttttttaaaattataaccttagcatattaaaattttgatcaaatatataaaatatatttatgaattttaatatgaataagcactacaattaaatcatcctaatttatacaaatattaatcagcgaaaaaaatcaatcactacgaaattgtagtgattgattcttactttttatttataaatattagtccaagaatgcataatattattcctattaatttatttatattaaagccttccttataaaaaattatacctactggaataagtataagtgcaagaagaatattagatactagagatcctatacttatatcccagcccgatctatataccattatatatccaaactcaagaccaacaatagcaaaccctagtaatatactcgcccaattcagatcatcaaaggattcaaaaaatcctttatctgatttataaaatttaaatgctatagcggctacaattactccagttaaataagtaatgaataaagaagagaaagggttagccttctccggaactgattttgagcaaatatgataaatcatatttgatacaacaacaattataatagaaaatgcatacataaacataaaaatctcctccattaattttactgcaattcttttatgatcatagataaatatcagaaaattccaccctagttgattctaaaatgtgattgtaaaaaaactcttttgatgatctgtaatcatacgtttcggtaaccttttcatttggcagcattactataaaagcacttcctttaccaactttactatttacaaaaattctcccacctagttcctcaacaaatttcttaactaatgataatcctaatcctgtcccctccacttgacgagatagagaactatctacctgcccaaactgctcaaaaattgtatctattttatcacttgaaatacctataccttcatcgcttacttctataaatatattttcttttaaagcattaaatcgtacagttattttcttattatcagaagtaaatttaatagcattagatagcagatttaaaagtatcctttcgaatttttcattatcaatagcgaccataaattctttatatgatgtttctaatattaaaccaatttcttttttactagcatatgatcttacagcttcaacaatcacgtctataaaaaacacaatatctatgttctttctatttattttggtactcttcaaatttgaactggttatatcaagaatattgtttactagccttaattgtctaaatgtattaagttttatcatccccaaatattttttagtattatttgataactcattaaaacaaatatactccatggcttgtactgctgaattaattacatttaatggtgttctaaattcatgcgatattatggaaagaaattcatccttcatagctattgttttttctaatgcttcatttctttcaagttccgccagtaaaactgaatcatgttgagattttataagcttttcctgcttaactttttccgttatatctttcatacacatcattccaaataagaaattaccactatcatcatatataggattaccacttatgcacatatatatattttcactatatttctttataattattctatattcagtaattatttctcctcttaggattctatttgatgggagactatattcgctcaattcattcatatcaacatcaaaatattttatctcacgatcatttttatttctcccttcaattatttttatgatattaaaatgtttctctgctgctttattaagcataaccaacttaccacagtttcctatagccacaactccatcagacatgttatcgataatcgcttttaattgctctctattatttctaatttttttctcattacttacaacttttgtaatatcatcaaaagcggtaacagacattagaacagtattttctttatcataaataggtgatgaactcatagctaaaatattttctttaccgttagctaaaactgtaatacgttgatttttaattctctcaccctttaaagcacgaaatgatggcatatcttcaatatcaatttctttacctacttcattaaaatatttagcttcgctatattttccgcttaaagtctttacatcattagattgttccatcaactttctcgatatttcattttgctgaagtatatctccttcttttgatctaacgaatactccatttggaatactttcaaatatagcctccatttctttgttttgaatgttaatggcatccatttgttcttcaactttctttctattaagtaccgtttctgtaacttcagatgtattacttaccacatatttgatacttccaccttctgtaactggaataattatggaatcccaatatgtaattcccctttcatatccaatatgctcatattcttttacttgaactgcttttcctgtaaatgtagcttccttccaaaatttttctactttccttccgctccatcctaatataatcttctctatgctttgccctatactataatatgattggttaaatggaggttctaagaaatctaaatattcctgatttgctttaataagtatcatgtcaggaacactataaactgctactcccacaaagtttgatttacataattctgataagtatgcatgtttaacttcaagtcttgaatttggattttctcttataataaataattgagtatcttttccattaattatttccattgaaattgatctaaattcaagagatttagtaaataaaaaatagtcggcctttttagcgatgttttttacatcaacgcttgggccgactcttagaattttaaatatctctttgatactttttccaagcaagtcagcagttgtatattccgtaatttctgcaaactgttgactcaccttaaaaactttatgattttttaataatatataagaagtctcttctatgcactcaaggtgccttctatcttccataatagtatcctcctaagttatccgttatcattagcatatgcaacaaaataagtaatattttaccacagtattttgtgtatttctactcctaaatttacttaacttaaattattttgaatttttaggcttcattctttagttctatttcattctaggaataagtttgcattcacaacaaataaaatcttcctaattgatttatattttgtgagcgtcttaatataggaaatttataaaggatattctatatgaattattaatatatacaataaaaatattttgcttctgttaaataatagatgtagttacaactaccactctaattccacctattaatatatactcagaattttaaacttcatcattcctaattatgcctattatttaaacttcttcgccattagatgaaattactttcttataccaatcaaatgatttcttcttcgatctctctaacgttccatttccttcattatctttatccacatatataaatccataacgttttttcatttctcctgtagtgaatgaaatacaatcaacacatccccacggagtatatcccagcaaatcaacaccatctaattcaattgcttttttcatttcttttatatgcgcccttaaataatctattctataattatcattacatgaaccatctgcatccttaacatcaatagcaccaaatccattttctactataaataatggaagttcatatctttcatataataaatttaaagaatatctcaacccaacaggatcaatttgccatccccaatctgaagcttttacgtgtggattcctaacacttgcacttgatcctccatttaccgaatccttatcaacttcattaactcctgatttaactacatcagacatataataactaaaccctaaataatctacagtcccctcagctaaaattttagcatcttctagttccatcttgatatcatacccttttctactccattcttttaatgcataagaaggataatgacctctgcaatgtacatcagcaaacaaataacgatcatgcattgattcaacttgaagcatcatatcatctggattgcaggagaaaggatatataggaacaaatgaacacatacatccaatttgaaagtcaggatttatttcgtgccctttcttaactactaatgcactagcaactaattcatgatgaacagcctgatacattatctcttctctattttcaccttctttaaactggattcctgaacaagtccatgcaaatatagaatttatagtatttttctgattattaatttcattaaaagtcatccaatacttaactttgttcttatagcgctccattacagtagttgcatagcgtacaaaaaatccaataacttctcgattactccaccctccatatttcttgaccaaatgataaggcatttcaaagtgacttaacgtaataacgggttggattccatacttcaataattcatcaaacatattgtcataaaatttcaaaccttcttcattaggctcaaattcatcacctttaggaaaaatcctcgtccacgcaatacttgttctaaagcatttaaaaccgatttctgcaaagagtgcaatatcttctttataatgcccataaaaatcaatagcttcatggttaggataattttctcccttaatcactccatctgttatccttcttggtactccatgagctcctgcggtcattacatctgcaacactgggaccttttcccccactattccagccaccttcaacttgatgagctgcaacagcaccgccccataaaaaatctttactaaaagccataaaacttcctccttacattttatttttttattaggcgtttgcgaaacgccgcaacccgcagaaatgcgggatatttttttagcaaaataaaataactcctcactgatttatggtaaaattgaattgcctaaaaacaaaactaccatatacctcagaaaggagtcatatatatgataacatataaacagctttctttggcagatgtttattctgattgcaaagaaaaatttgaaaatgataaattccaatttctttctttactcgaaaacactatcgaccttgatgagttagttcctgcatctttcattaaccatttttacgcttccacaggaaggccgcgaaaatatcagctttatgctatgatcagtgctttaattttacaacgcattttttctattcctacagattctcttttaattattttccttaaatattctcaagaactaagagacttctgcggctttttaagagttcctgattcatctaagtttactcgtttcaagcaggactttcttttggacttacaatccatgttcgataatcttgttgatattactgaaccgatatgccaacagattgatacggctcttgcttccatgactatttttgatacttcaggccttgaagcatttgtcactgaaaataatcctaaatatgctaatcgcattataaaacagcttaaaaattttaagaaagcatgcaatttagatgactcttatgatccttataaagctgcctatggctctatgccatcacacgcttcagccaaccctgccatccaacaaatgtatattaatgggcatttttgctatgcttttaaattcggaatcattactaatggcctcggtatcgtaagagatatttcgttctataataaagattttctcaatgctcatcctgatattattgttgagaaaaaatctgattcacctgatgaagataaatctcttgcagattctaaggctcttatccctgttctcaaagatttttttaacaagcatccattaataagtccaaaaacctttttaggagatgctgcttttgacagtattcaaatttatcgtgatcttcttctcgaattaaaatttgataaagcatatattcctttaaaaactaggcttacactagaaaatgctgattgccctttaaacgaagacggcattccatgctgtccgaatgatccttctattccaatgaaacgtgaaggtagtaaaagtcatcttcgttctagaattccaacaatgaagtttgtatgccctaaaatgaaatggttatataacaaagaaaccaaaaagagcaaacgtgtaactcaatgtgaaaatccatgtacaaattccttatgtggacgaatgttttatatttatcctgaaaagaatctgcgcgcatatcctggaataacacgaggaacccaagaatggagtaatacttataaaatcagagtagctgttgaaaaaaatataaatcacttcaaatatagttactgcgtcgcggagcgtaagactcaaaatgagcaaacacttcatgctgatttacttctagccggaataactcaactaataacagttatcgtggcagataaaattcataaacataaatatatccgaagcttaaagccattaattgcataaaatttatttataaaaattggaattcaccttcgctttatttcgtgcgcccttttttaagaagtcaactattatatttgtatagcaggaaccattaaatccattaataatgtttttgcaacttcaaatcaatcattattcatttttatcaatgagtttcgcaattatctatatttttttatataaccatagcgtaatcaaatttctacactctaattttattttaatatttagtttacttcaattctaaatatagatttattatttcaatacttatacgagaaataaaattaattattataaaaaacttaacaatacttcttatataatacatattttaatttatcgaaaaatcccaaataaatttcctatttaattgcaaaaattcattaaaatattatgctaaaattctttcgaaattagctataaacatcgcactttttactagatattataatcacattctataataaggataacctaaaattatatacatatgtactaattaagataaaaaatataccctaaacggcacagtcttttagacattaccttttagggtatattctcctcatttcaattccattgattatgtataattaaattaagctctatgattaaaccaaatatcaaaaactagaaataaaggactttcataaaaataattgtcctttatttcgataagccacatgtaattattatggcttactagtttgagaattcttgtgttcccatgtatttaccatttccataaagaactcctacaccaacttcagtatatgaagaattcatcatgtttgctctatgacctggtgagttccaccattgagtaaataattcaacagcatcatatgtgttgtatgctatattttcacctgttgtagtgtatctatagcctactgcttgcaaccaatttgtccactttgttccatctggatttgtatggtcgaagaaattattttggatcatatcattactcttatatctagccacttgtaataaagtattatctaatgttaacggttttaaacccgcttctgttctttttgcattcattaattcaagaatcttttgttcagcagcagcttgtacagttacagaataattagctggtaacttaggtaacccctgaacatctagcgagcttgtacttgtagaagtatttgttgtacttcctgaatttgttgtatttccagttgttgttgtgccagtactatttgtatttcctgttgtaggttttgtagttacagtaccagtcgtacttcctgttgcgggtttagttgttgttacagttccagttgtacctcctgttgtacttgtcgtatttgaaggttttactgtagatgttttattattatcttgtactacgttatttccagaatcgaataccttatcacttgatggagctttagtccctataacttgtccactttgagaagttgtatatattctattgtttactaaaacctttccaatctccattataccattctgatttaggcaataagtctcaccattaactttaataacaccagtttgcattgctccactattatcaaagtatgaccattgaccattgttattaacccaaccagtttgtaatcctccattagagaatacattgtaataattgttaaacattgaattagtagtcgctgcagatactcctaatggtgcaatactagtcattgttgtagcagcaataacagccgtcactatctttcttaaaaaagctttcttcattagtttttctcctttgtttttttatttgtcttctgaatttttaaagtaaacattttctttattaattgctttacttgtttactctttcaacgaagtccatgccttaatactatcatcttttcgacattattcaacatgtttttccttagagattctctttgaaaagaaaatagctgtaacttcctctgttttacttatttttactctatcgtccgcccttatatgctctaaaccttgactctgcaaaggactaccccctatatattttttcgaaataccatagtattattaaaaatatctctaatcaaaaaccttgttttttacattttattcataattgttataataattttaacattatttatctatatttaaattttatagttttacaaaaaaatataggtggataatccacctataaaatattaatataagaaagttaagtattagttaatggggtatctacacagtatacatttttttccctaaatatattccatgtcattaaaaataaataagatttatttttaaataattttcattattttatctacagtttccaatacagaaatgttgcttgtatcaatctttttagttgacatttctttatataaatcaagacgttcaacacttctacttacgcactcttcatcccttaactttaactttacatctcctaaaattctcttctttagagcatcttcatcacaaattaaagttatcttgataatctcaaaattcaaatcatttaacggttctaatatatcatcaaaaatttcttccatatgtataacccaattaaaaataatatattctaatgatgaattagtaagaaagcttctcagtaaataatttatattatttataaccattttcttattttcctcattaactacgaaaggatttatcatccagcaccaatccccatcaagccatactgaattttttaactttttatttaactctctacaggttgcactttttccaacccccatagttccatttattattatcacttttttcttcatagctctctcctttttataatgtccaattcacacgaactaatatggtacatctttagaatgacttcttttataatcccatatttataataacactatccacttaattgttaaatataccctttttattatatatattcaataacgattagtgcattgactataaaaaatttttgcttcttaataataaaactcaaaaaatatagtttctaatgcaacatttcatgtttttcatataatattccaacattgccacataatattctaaactatatgatataataattaatcaaagttatttattttacgaaacaaaatataattatatcgaagaactaaaacaattatgtttttaaaaggagcttaaaaatgaaatacgaaaaaatattcctatcaatcacttttttattaacttattttataagtataatacttttaccgaaaggttttattggagccttaactattataatggttattccagctttcgctgctataatttcgatattgatggaatcaaggtcattaaaagtattactaaatccctttacttacaaaatcacattgaagggcttaattttcgctattgcatttccattaattgtgatctttctatgcgggtcatctgcatatttaactaaacaaggtgtattatcagaaaatatatcgtacatatttctcgattctataaagattactttgatctctttaacactttttatagctggattatttgaagagtatggttggagaggttaccttttacctcgtcttttaaaaagatatagtattaaaagaacaaattttataatgggtatcatttggtcattatactatgttccagcattctttattctaaatatgcattttggtttacctaaagcagttacatatgtagttttgcaatgtgcagctatttttgcgttgaactattgctttacttatctttatacaatgtcaccaaatgtgattttaccaagtataatgcacatattatggaataatataaacatagccacacttggctactcttataataatgtttcttatggatttattattggtaatgtaaaaattattaacggggaaggattattagggttaatttttttaagcatatttgcaatttacgctcacagaaaattttccaatcatccgagtttaaatatatagctatctaaaattagcttaatcatagcatgtcactcaaaaaagcagtataactctatagtctataatatcattatagactatagcatatatggttgtgttctttaaaactctgacctaatatctctagtcttaaatctagttttcttaaagaattaaagataggccgagcaacgctctacctatctttaattctgtttttcagattattatgtttgaattgttttgcttatgtctacattatcatattataacaaaataatccatatcttcttatgcatttgtaaaatctcacaaaaataatgaactatcaacaattttaatgtaaaagtcgctactagagcttctttaaataagacaagctaacttaacccgttatatcacttaaactaattaaatgcctttaaaactaaagttgcattgtgtcccccaaaaccgaaggaattactcaaagcataagtaaattccagattctttccttcattaggtacatagtttaaatcacaatcaggatcttgatttttgtaatttattgttggagggataaatccttctcttagagcacatgccgttataatcgcctctatagcacctgaagctcctaacagatgacccgtcattgattttgttgagcttatagcaagttcatacgcatgtttcccaaaaacagattttacagccatagtttcatttttgtcatttgcttttgttgatgttccatgagcgtttatatatcctatatcggaaggtgtaatctttgcgtcttcaagcgcaattttcatacatcttgcagccccctccccttcttcagccggagcagttatatggaacgcatcattagtgcacccatatccaactatttcggcaattatattagctcctctatttaaagcatgctcatattcttcaagtataagaacacccgaaccttctccaagtacaaatccatttctttctgaatcaaacggcctagatgcagtagccggatcatgatttgttgtcatagctttaattgcacaaaaacccgctaaagttagtttcgttacacaagcctctgctccaccagcaatcattatatctgcatcatttctttgaattactttaaatgcgttcccaactgcatttgttgaagttgcacacgctgtaacagtacattcattataacctttagctccaaattttatagcaacaagccctgaagccatattagctatcatcattggtactaaaaacggacttactcttctaggacctctttctttcaattcatcatactgactttctaaagtcccaattcctcctatgccgctaccaattattactcccatacgctctttatttattttttccaaattaagtgccgaatcttccatagccatttgagctgatgctagagcaaattgtgcaaatctatccattcttttaacttcttttttatcaataaagctacttggatcaaaatcttttacttgagatgcaactttggtaggtaaatcagaaacatctattccctcaatcatactaattccagactttccatcctttattgactcccaaagcttatctgctccaattccaagtgatgtaactgctccaatccctgtaataactactcttctactcatactaaacctcctattttccgtaaccaatacagtataattctttctaatttacaaagtatttactttataacttttaatcgatataataaatctaaacaatttaaaatcatctttcaatatgattttatatgtaaattgttaattaaaatgaacagatattgcttttttaatgtccgatatatttccaaaatgaataaattaatatatttaattttgttcagcatcaaatatattacataaaattattgccttattatttttcatttatctcaataactattttttagaaaaggtgtttaaaatatgaaagacttaaaagaaactattattgaaactgtagcttatattgaagataacctctataataagatttctttggctgacatctcactacatacaggaatatcaaaatattatctacacagaatctttaaatctttaaccggcgaatctattatggaatatgttcaaggtcgaaaattaacatctagccttaacgaattaattaatacaactatgcgaattatagatattgctcttgagtacggttttgattatgaacaatcatatattagagcatttaaaaaatgttttggacatacgcctcttaaaattagatccgataagatttctttaagtttaatacttaaagaaaaaattaattgcaatgatatcttatccataggtaattctattacatataatcctcaatttgtctttaaacaaaaattcaatttgattgggataaagcataagatattaagtaaatctggtgataaaagcgcaaattcatatggtcgagatttcttctataatcataagcataaaattaataatttgataaacccacatgaatactttggttttacagattggggtagtgatgacttcatatattacattccaagtgtccaagtttctgatataaatactatacctgaaggaatgattagtatttctataccagctcataaatatgtagtgttccgttttgttggtttctttcgccctgacgatcttaacggaagacatttaggccgtttattagtccagttatatagaaaatggatttttaagtctggctataaatttgctgccaccttcaggtttgaatatatagacaattcaaggtccaaagacaattactgtgagctatatgtatatcagccaatagaagatctaaaaagagaaaactagactcgtatttactaatttaaattaataaatacgagtctagttttcttagcttctgaatatcatatattaacaatgtaattaacttttataattataagggagcaattttatggtattatttttgttattagtttgtggattttgttggtcgattgtttatgtaaaattaattcatttaggttttagatataaagcttgcggaattccatttattgcattagctcttaatttcgcttgggaaagtgtcaattcttatttcgatttaaaagataatatattaaatattacaacttatatcactttaatttggctatgcttagacattttagtcatcttaacttacctattatatgggaagcgctatttcccaaaacatacaaataaagaatacttctggccatggactttgattatatttataatgtcttttgttatccaatatttctttatcatagaatttggtgatttagctaaattctattccgcttttatccaaaacctcataatgtctatatcattcataataatgcttgtcggtagacccgatataaagggacaaagtttaactatagctattaataaatgtattggtaccttagcagctacaatctcatctagcattattttgcatagtggattaatcattactttaggaattttctgttttatatttgatactgcatatatatactttttaagccatataaaacgattgcattctgattttcttaaatcatccacaaaaatataattcaataaaagataaagcaccattagcggtgtctttatctttcattcaatatatccaaatgattcgaacacattatatttatccaatttatttcttgaaactctttcacaaagaaaattctattaaaggactttcaacttttgattcaagcgtcaactccgaaagatcatctattgttttaatatttctcaattcctccaacattccttttatcggtccaattccttgcttattccttgcatcaatatttaaagtattttgtataaattaattatcttcttttcatcactattctctgcgtgatttttttcattatttaaccatttcctattcactgctgaataaaaatcatcttgaattcttaatttaaccttaaataaatttatagctttaattctttgaaaacaagatgatatgcagctctggttacgaatatttttatacttatgccttattgaacgtatgtaagaaaaatttagcaaacaaataaaaaaacagcgctcagatatgtagaaatatctaaaagcactgttttaaattattcacttaaatttttaattaatacttgatttattctttttctatcgcattttaaaattataaattcatacttgtcataatttatcttttctttaggttttggatatgacttcaattgagagtaaatccatccaccaatagtatcaatattttcagcttcaatattagtatctaaaagttcgttgatatctccgattaaaactttaccatcaactacatagctaccattatcagtctctcttatttcctcttctccgtcatcatcaaattcatcttgaatttcaccaacaatttcttctaagatatcttcggtagtcacaagccctgctgtaccaccaaactcatctataattattgccatttgagctttttcctttttgaaagttttaaacaattcactaatcgataatgattcgggaacaaatttaatttctctaataattccttctatgttatcattgccttcaaatttaagtttatataagtccttaatatgtatgaatccaattacattatctttactatctctacatacaggatatctagtcagctgttcctctaaagcataatttataatttcatcaaaagtatcttcaataaaaatacatgccatatcagtacgcggtatcataatatcccttactgttttttccgaaaagtcaaatatgttatctacaaaagttaattccgtttggtctattaatccatgtttatagctatcttcaactaaaagctttatttcctcatccgtatgagctgcttcttgctcattaatttgtgaaattccaaatatctttaaaaccaaattagtactatggttaaaagtccacattatcggataagtcaatctataaaaagctataagcggcaaagctgtatacattgcaatattttccgtgtttataattgccaatgatttaggtgccaattctccaagtacaatatgaagaccagttataattgaaaatcctaaaaccactgaaattgaatgcaatgttatttccggcaaattaaatagatttattaaaggtcttaacatctctgcaaatgcaggctctccaacccaaccaagtcctaatgacgctaaggttattcctaattgacatgcagataaatacgaattcagatccgtaacaacttttaatgtatgctttgcatttctgtttccttccattgctaatgtttctatccttgattttcttacctttaccattgcaaattctgttgctacaaaaaaaccattcataaatacaagcaaaattacaataataacgtttaatattataatcatatattgatagtttccctcccaagttattgtatgtatactactatataatactattttaaatactaattaacattataacatatattgtttaataagttagagtataaacaattaataattcattttattttatattctccattctccaattaattaaaccctactatttttcttactaaaacaaaatctgtatacacttatgaggaatgactttttatcgagtttgtccatttaagttcatttttatctactctttatctataccttcaacatctgttttcatagcttcaactatataaatatccaacttctgactcaactttaaaattttattatagtccagcctttcactaattattttatttaattcatcccttaattcttcaatttctttctttttgtccatactgtacctccaataaaatactttttagctatatattgtatttaaagccattagtaattacattatataacaaatattgtttactaccaggaaactttcgacttttttcgaaagctataaaatgaggtgataagtatgttaaagagaaaaagaagagaattaaatttaactcagtcgaaattggcaaaaaaattaggaatcagcaaaagttatttatctaagttagaaaaacatccctccctttgcaatcctaatattaattttattctaaaattatcgaaagaattaaacctagatcctacagaaatttttttatattttatagaaagcaaaaattcttttattaaataaaaattatataactattatcatatacatttcttacagatcatatctaataaattgcattaacaaaatagagtatattttttttactaaaacacaacctaaaactattaattatattaagaacccggaggcttcaaatgaaggtattaaaaaaaataataatttttactactatattaacattatttatcgttacatcattaaatatagtaaaaaataatatatatgcaaacgcacaaattaaatcagaaaaaactataaaaatagtagtacttctctcttcatttaatgatgcttatatttctttgattaaagataacttagaaaaaattcaaaaagaaaacgctaacaatctagaatttatatttcttgatgggaagaataatacagacatacaaaacgaacttataacttcaacactttcaacagattttgatcttttattagctaacttagttaatttagatgcaaataatatagactcatttattaacaaagtaaagtcaaaaaatattcctgtacttttattcaatatagttccatttgtaacaacttcaataaaatcctatcccaaagctcttgtaatagctacatcagctgaacaatccggaattctacaaggagatttaatcgttaatgcatggaaaagcaataaagcagctatggataaaaacaaagacaatattcttcaatatattatgttaacagaaaaaaacaataacacactaactactgcaagaacaaggtattctatatcaacaattaatatatctggaataaaaacagaggaactttccagaatatcttcagaaggaactaaagaagctgctcaaatgattatggagtcgacgtttctaaagtatggtgataaaattgaagctataattgcaaataatgatactttagctataggagccattaatgctttgcaaaaatatggttataatataggtaataaatcaataccagttgttggtgctgatgcaataccagaggctagagaattaattaaaaaaggttctatgctcggtactgttatccaagatccatctgagatggcagaagctctttataaagttggaatgaatttaatttataatagaccacctcttagtaatacgaactataagttcaacgaaaccggctttgtagtagaaatgccttacagagaatataaagaatgaataaatttgaaattattaatacactaattcatatgatattaagagtagccaaacggctactcttaattaagttataaacttattatttttcatctttattagcaactgtttctgcttcatttaaattcgaattactactcgaagtaagtagtgattcaaatttccttaattcactttttagtttctcattttcctcttgcaacttagaattaatatcattcaattccttaattacttttgcattaccaaatgtaaaatctttgcctagatttaaattctcaagtatattttgttttaattcctcaatatcctctttttttaattctggaaatttagatattaaagtattatcaaacttgtctatttttaattttagtacattctcaattgtacttgaaattccaaaatcctcatcaatcatatcccaaatttctcgtgcttttgaaatataatctggatgttttgataattcctccttcaatccagttttattaaatctgttagtaagaatcttctccactggctttaaaattgcttttaacattatatacttccttcaatattattttataccacatattatgaaataccgaccttaaaatccacttttcttatgataatataatataaataatttttaatgagtgttaacttaaaatttcttataaactataccatgacattagtatttattaagaaggtacaaaaaaaagatgcggcccaacttagccgcatccatatttataagagattatgagattattaaggttttatataatttgagacatactcttttgtacacttatatattaacataatccgacaaaatattctattgtttttattatatttttataaatttaatatttaagtataatagataacgtttttgcagaatatatttaatgcattaatctctattcctctaattaacttaagtaaagacgcagccagtattttattggttgcgtttaaaaaattataactgcattaaagcgaggtataaataatgaaaataaaaaacttcttagcaactctcttaatattttttatctttactataagcaatgctaatgcaacgattccaatagcaaatacttacaagcaaggtatatataaaatttctgaaagcagcaaagaaaattatactgcaaaacttataactcctaataacattacaagtttaattgttatagatcctgatggcgatataaaattttttaagagattcgatacagtcaatgaaacgattaacttaggtcctatggttaaaggtgatatagtatcaataatcggtaatggagaaatagctgctaattttataagtataagttaaaaccactctctcgagtggttttcttacattattttagcattccaaaatctttaaacggataaaatataaactgagcctttccttctattttagagctatctatatagtgttctttccaatatcttgcatctaatgatacaggtctgttatctcctaagaaaaaatactttccttgtggtacttcgaatgatccattataatcatccttatttttcacataatcttcttccaacttttctccatttacaaatactaccccattttttatatctatcttatctcctggcaaacctattaatctctttactaaagtttctttaagttcatctgaataaaatacaattacgtttcctctttttagattatcaaagttatgtattcttgttactaaaattttatcatttaaatttatagttggaatcattgatcctgttggcacatatacattaaaaaatacaaactgtcttagtaaaaacgctattactaaagcacaaaatattggtattatccaatctttaataaaattacttttcttcttacctttttcttctattttagtactttcttccaaagcatatcatccttcccagattataattaatatttctgcttttactatatatacagattaatttagtaaccatttatttaacttaccaataaaataagaattagtcaagtttacttacattatattaatcatcataaaagaaaatataaggtactattctaaacaatatatattctttagaacttgtaaccttataaaaaatataatttctatatcatattcctatcttcaacttaaaatcaaaatatcacttaattacagtcacttacctctcatgaatattactgttcaatgaattttgttagctcttcattgaatttttctttttcatcgtagaataatccatgtccactatcagtgaatggtataattctggaattcttaatgatttgcttttgagctttagccaaagcaaataaacaaacttggtcatgaataccatgaagaatcaatgtcggaacattaatttttccaagatccgaaaacaaactttcttcacctaaccaagtattagcaacttctgctgtagcccaacctgctgcctgcaatccaagctgaaagaaccaatttgaaaaactctctgtaatatgcttatagaaaaaaatatctccaaaatcttgaagcattttaggccgatcattatatgttcctttaattatatcaataacggcttgtttctgtaacccatgaggaaaataagatctttgaacaaggcttggtgctgctgctgcacaaagaactaacttagaaactttgtcattatcatatcttgacatatatctaatagcgattgctccacctgtagaatgacccaacaatgtaaagttttttaaattaagcacttccacaactcttctaacatcatctgctaatctatcgtagtcataccccctgtatggtttatctgattcgccaaaccctctttgatctatcccaatacacctatatcccattttaggaaggatattaaactggtattcaaataatttatgacttcctggccaaccatgtaaaaatacaattgtatttcttccttcttcattaagatcttctacataaactttaacgtctggttctactttaatatagtaatccatgcaaattgcctccattaataaactttctttctaaaaacagcttattcttttacagcaaataggtgaattactactattaagtttctaaaactaatattaacatgcaatttgattaaaatagatatttatgatttacttaaaggatcaatttaatatattagttataaaactcctaagacaaacactgcctatataagcttacattaaatttagattaagttttactcaattaaattttctttttaaatatacctattctcatatctatagttataactaaggattcataatcttctaacctctctttattctccggtgtagacttccaataatgaggtgtcatctttaataagctcaataattcttctttatttaatgttatatcaaatgttacattagcttcttctatataatcattttcttctgcatttgctttataaactttatcatttaaatgaacctcagaataaataatattcctaagttgtattaaatgattagttctaggtaaaactctaacaaatattccatcatcctttaaaactctattacactcatcaatatctataggactaaatactgaaataatacaatccactgttttatccccaagtggtatgttaaaattgtttccaaccgcccaaacgcaatctttgtttagtttacttgcgtattttacagcttctttagaaacatccaagccataataattagcttcaatatttttcttattcatataatcttttaggtttgttaagtaatacccttcgccacatcctagatctacaatattcaatttgttgataatcttatctgacatccaatcaactattatttcatttattttatcagacagtgctttataatatcctctagataaaaaatctattcttgataaaaccatttcttttgaatcaccaggattcttacttcttttctgattgcttattaacaaatttacatacccttcttttgctatatcatatgtatgtttgttactacatctgtacatcttatttgaaatatccttgactaacttttccttacaaacaggacaaagtagcagggtctcatttaaaatattattcataaacttacaactctctttccatatattatgtattatattttaattgctaaaatcaacatctatggtaaaaatcttcattattaatcagtgtctttagactattgtatacttcttctatttctcttggtatatcaacatggactataaatccttttccattaggtccatacccattttcgttatctcttaatcttggtatctctcccattaaaagttccaaatatcttttatcatcccaaatcccattaattccagtattacttaattttaaattcatatcaatcttaggaataaatggagcatagtttattagcttaacattgtcactatatgtatacttagaaaatgaagcaaaagttctaagttgcatagtagggtcctgaattaaaattaaagatttatattctatatttaatttgcgtaataattctattgtctttttagcattatctccacaattcatagatttattttctataataattttatctgagttaacaccataaattttagtcattatatcaaaaaatatatcagcttccggcctaccatctacttcaatcgaattaaactctgaacttctccttatttcatctcttagtatttgggtagaatgtccaatccccccactaatcaaaatcttatcacatatattattcttccatgcattcacatcacactgtactgtataaggtatagaattccctaataagactaatgcatcaactttttttaatccaaattttctttctagttccttatgatttaacgtgttaatatctctaactgctaaaaattcagatatcttattaatacaatattggattttttcactattcattgttatttccctccactaaaagcatataataacaaaatcactactgatatgaattaataaattataacataaactataatacattttttcactaactttgcatatttattttaccataatattatctttatgttatttatatcatcgttagtaaaccctaatataataatcattgatttgataaacgctataacaacataaatatatattattaaattaaattttaataaaaaagcacacttataaattcattaagaattctataataaaaatttagctataaagtaaaatatcaaaaaaaaataagacagactagccttttaggaatagtccatcttatccgtgggtataaatgggagagggtttatatcttttgtataactatatattaacatatttcaacaataaacgccatatattttaatatatttctcatttatttttcgacatttgctctatcaacttccactaatgtttccgtcttttttttgtattattatttctaaattcattggatttatcaatataacttgtatgaaataaagattctgcccttgtgctattaggatctcctatatagctcttatacatattttcaagattttcattttcgtctgacactctttttattgattttttatcaatattccttagaatatctgctctcaatattttataatcttttcctaacaactcatttgaggatttattataacattttacctgtacagctttagctctgcagacgttattacataatttacagccaacacactcttcttctttaacctctgcccttcctctaacattatattgtatcgcattgacagggcaattttgtatacaagtaccacacgatatgcatagattttcattaatttgagactttgcacctattctaggagttccacctccatttatgcaccctccgttacatgccactacttcaatgaaataatattccttccatttgttactgactaaaaatctttcgatttcttttagaccatttatcactgctactttacaattcttattacctaaaataaccgatacttcttctatttcctcatatccttctactggttttaatatcatattttcagcctcagatatatcgttctttaaataactcattacggttctaaaaattgcttgcattgctccttgactcataccaaaaagagctgctgccccagtatattcccccataaaatcatctggtttttcgtctggtatagcagttatatctatgcctttctcttttaagagatttgcatattcttttacagttagaacaatatcaatatctttgtaaccatctctccccatatcctctttatcagcctcatattttttagcactacatggttgtacagatacaacaactatattggtaggcaaaatattataaacatctgcaaaatatgtttttattcctgctcccatcatctgctgaggagatttcgctgtagatatattatccagtatttctggatgatatatttcagcgtaacgtataaaagaaggacagaaagacgtaaacataggaattttttctttattagcaattcttttaatgaattcactactttcctctacaactgtcatatcattcccaaattcagtattaaatactttttgaaaacctaatttctttgcggatggagctatttttcctccaacataagtacctattggaagattaaattcttctcctagtgttgctttgactgctggagaggccgttaaaactaaatatttcccactgcttaaggcttctttaactaaatctacgtcatttcttacatcaatcgcttctgttgggcaggcaagtgtacattgtccacaatatagacatccagaagccccaaatcctccactttttgtatccacagttttccttcctgaatccacttcctttaatatcgccatcttagtttcttgagcacacgtaaaagcgcatgcagtacatccaatacattttttcttgtttatttgtatgatattatcctcttcaattctattggctttctttgactttcccataaatttctccatattattcatttctatagttataattactttttatcttcttttattattactatatctagcttattaattatttaaatttttcataacaactgaaaactatcatttaaaaatgaacataaacgcttgactctgatcgtttcttaaatatttaatgagcaaaaaaagacaggatttaaataaaatgttgctatataatataggaaaagattaaatgaggtgagcgccttacatgaattatgaagcttgtataaaaaagtccattgaatatatagaaaataatctaaataagaaaatacaactaaaggaacttgcagataaggcctttttatccaaataccactttcatagggtttttcattcagtggttggagaacctgttgctgaatatattcgtaaaaaaagattagaggaagctgcaaatgaactattaactacagaaaataagattatagatatagcgctaaaatatcaatttagtaatcaggaatcatttactaaggctttcaaaaagctttatggaatcccccctaaggaatttaggaaaaacaaaataaatttaacaacaatacatttaagaaagaattctacaacttacctttctatggctgcttagaattcatcaaaaatattttttaaggagtgaatctttatgagctatgtaccaatggttattgaacaaacaagtcgaggagaacgttcttatgatatctattctagattgctaaaagaaagaataattatgctaagcgatcaagtaagcgattctacagcaagtataattacttcacaattactatttcttgaatccgaaaatccagatggtgatattcacttttatataaatagccccggtggttctattacagcaggaatggcaatatatgatacaatgcaatatataaagcctgacgtatcaacaatatgtttaggattagctgcaagtatgggatcgtttttacttgcagcaggcgcacctggaaaaagatatgctcttccaaatagtgagattctaatccatcagccatctgtacatggaggttttcaaggtcaagctacagatattaggattcatactgaatggctgctaaagacaaaaaataaaataaataaaatatatagtgaaaaaaccaaaaagccaatagaagaaattgaaagagatatggaacgagattattttatgtctgctaaagaggctttatcttatggaataatagataaaattctttgataaatataaattcctattataaatatattgaaaaggttcaaaaatttttgaatcttttttattatgtttatattattcacatcttcattggctataatataaatagtattcttattcttaaccaaaaagcaggtgaaagtatgtattatgtaatatatgatttagaatttaaccaaagaagtaatgcctctgaagattgcaataacattaatttttcaaaatttaatgatgatactaacataccacttattccttttgaaataattcaaattggtgctataaaactagataataattttcaagaagtgtctacattcaattccttagtcaaaccaactctatataaaaccattcatccatatgttgagaatttaactaaaataacatacgataaagtttcttcttgcaaaaactttattaatgtacataaagcctttttagagttcattggagatgatgacgtactactgtgtgtatggggcgttggcgatattaaggaactctacagaaacttgggattttataatctatctacttcatatatttcaaaatatattgacattcagaagtatgcttcaaaataccttaaagcacccaaaaattctagaattggtttaagaaatgctgttgagattttaaatataccaatttatagtgaatttcatgatgcacttaatgatgcttactatacttctgaaatttttaagcgtatttataacaaatacatgaagcctgaaacttacgttccttcaccagcaaaaagaactacagaacccaaagaagtaattgataatgaagctttattaaagcaatttgaaaaaatgtataatagagaactgactaaagatgaaaagtcaatgattaaagttgcatacatgatgggaaaaacgaaacaatttctgaaataaatgcagctagtagaaaactttttttagttcaatataaaaaggatactctattactaatttttagagtatccgtgaattcatgaaccgtaacattatagaccttttattttatatttatacaatggccttccaatctttccatactctatgattttctccagttcgccttgtttgctcatatagtcaaggtatttccttacagtaacttttgcaatgcctaacttttctgataagtcctcagtagtaaaatactcttctttagtattattaagctcattagcaattgaattataagtatacttgttcaagcccttttctagatttggttttgtttcactattgtttgttttcttatttttattactcaaaataaacttatctagatcgctttgttccatagtctggctattttcaaagctatttaatctttctctaaaaatattgagagattcgttaaacctttcaaatgtaaagggttttatcaaatagtctacaactccatatctaaaagcatcctttactctctctacactcttatcagcagtaattaatataacatcagataatatttcattttgccttaaccactttagcaaatctatgccattttcattaggaagaaaaatatctaataaaattaaatctacctgcttctgcatcaaaaattcttttgcttcagaaaggtttgcaactgctttttccagtgaaaatccctctatttttttcaaaaacttagaattaatttgtcttaccatcggatcatcttcaacaatcatagttttaatcatatatttaactcctcctcataggtatagatatctcccattcagtaccatcatcaactttaaatttaatagctcctttagcttcatcaatgatctttttcactatatacatcccaaatcctcgttccccttctttacttgtgattccaatgttgtaaatagaatttctgatattatctggtatcccacagccattatcctttaccataattttcatttgatcatcttcctcaaaaattttcatatatatttcaccagtcccatcatttttagctgcatcaatagaattttctattagatttcctacaacagatcctaactcttctgatgtcatatattgtggtaatttaattactcttgagtcatcatctattatcaaattgattctagcttcttcacacttactatatttagatagtattaacgctgccaaagatacattttttattttatcagatattatagtagttatattctttttactttccactattacattaacaaacttaattacttcatcatattcttcgagttgtataagtcctgagattgtgtgaagtttattcataaattcatgattttgtgctctaagtgaccatgccattttctttataccagttaactcctcagccatttttctaacttcacttaaatcttcaaatgttacaactaatccaagaatttgttttttaaatcctcttataatactgtatttacacataacgtttactccaggacgaacttttatctcaatattagtcatagatttcccactgtttaaaacttttagagccatactttcgtaggtaaaatcagtaatcggcttccctatatcattttctttcaaatgtaaaactttactagcttgcccgttaaatagcgttatgcatccattattatctaaagctattataccttcctttatattttcaattacagtttctttttgctttaaagccaaggctatttcttctggttcaagtccaaatattgacttctttatattataagaaagagctatagctcccgatatacccaatattaatcccattaatattataggaataaatttatacattttcgtatagacttcgttatcaaatttattatacaacataccaacagcaactgcacctatctgcttattactatcatcataaataggtgcaaatgctcttacagaaataccaagtgtaccacttcctgttgatatatattgctctcctgtgcttaataccctatcttcatctccaccagcaaatctttctcctattttacttttatctgggtgagaatatcttataccattcatatccataattactataaactctacatttgtctttatacgggccttctctatctcaccatttaacagatcgatcggaattgccttatttcctttcaaatattctttaacttcataggttgatgcaaatgaatccgctatattcaacatatttttatctatttgatctcttaatagctttttcatttcgataaaagaaagtattgttatacttccaattgaaattacaaggatagctattacaagagatattatttttccttttagcttcattttatcccctctatctaattctaaattttagtttacttacattatatataaataattccttattacaaaatagtacaacttcattggtaatacgtttacttactatttatcaaagcaatttcccacaaaaagttaagagcgtatccctaggaatccgctcttaattcataatttattaaagccaataaactaatactcaataattatagtaatactaaatgctatcttttcaactactttctaatctttagtatatatagaagtctatttatattctttaacttcttcttgcccgtttaaaactcttagtgcaccttgagctaaagcaagcatttcatcttcacctggataaacagttattggagcaataaattccactttttcttttatgatgtctaccatcattttttcgtaggcaatgcctccagttaaaattatcgcatctacttttccacataaaaccgcagctgctgctcctatatcttttgctacttgatatcccatagcttcataaactaactttgccttcatgtctccttctgatgcaagctgtctaactattctcccatcgtttgtatcaagatatgctacaaagccgccttttccagttatcttcttcaatatttcttctaaagtatatttcccactaaaacacattctagctaaatcaccagatggtataccaccacttctttctggtgaaaatgcgccttctccatcaagagcattatttacatctattattcttccatttttatgtgcgcctactgaaacaccgcctcccatatgagcaactataacatttatatcctcatagttcttcatattttcttgcgcatacctcttagctactgccttttgatttaatgcatgaaatatactttttcttggaagttctggcactcctgaaagtcttgctatatcttccatttcatctacaactactggatctactataaaagcaggtttattaatagacctcgcaatttcattagcaattatagcaccaagattagatgcatgctctccttgaacattttcttttaaatcttttaacatattatcgtttacactgtaggtaccactaactataggctttaaaaggccacctcttccaactattgcatccatttcagttatatttattttattatcttctagtatttttaatataacttctgttctaaagctttgttgatcaactacgtacttaaactttcctatctcttctgatgaatgtctaagtgtttcctcaaaaatttccttttcaccttcatatactgctattttagttgatgtggaacctggatttataattaataatttatgactcacacattttcctcccctacgttatatttaattatagtatttgcatctactgttattataaacacagatacaaaacctgtttttaaattatactctgtaggtatcagctttagcaagtatttttcaatattaaaattaattttattaattcatactatagctcttaacccaatactaataattatttattgtactactgcttctctgctcaatttcttttctttatttgctctaagcattttaaacacataagaaacaatgaatggacaaacaatagcagatactacgcatgccgctgcaacttgtgctgttgctattgtcgctattgcagccaatgttgggtctgccgctgcaacagctgctggtgtggctactgcatttcccgctgttgatcctgttgcaagtccaattataggttcttctctaaataattttaaaagtatatatgcccctattccagtaaaggcagctatcactcccaataatataccaggacctccagcttttacaattgtatcaagattcattcctgcacctaatgggaatgagaagaatggaattaataacaacttactgcttccaagaaactttctcatatcagggtcggcgtttcctaaaatcattcctattcctattggaattaacactgcaacaagtgacataaatggaatttgagcaagccctgatgcacctaatgcaaccaaagtgaaaaatggaccatcttttaaagataatagagcataagcacctacatctgtttcatcaccatattgtgaagctagagatgcatataacccaccgttgcaatttgttagtgctgaaagaatcgctagtggtgataaacctaataccccagctggtccaaaaacttttcctacaattataccgataccagcacccactatgaattttccagatattaatagtgcacctttttttagtgctttaggtgctaatttgaaattaatttgtgagccaattaaaaacataaagcaagccagaattgttgatgatgccgtcgaactaaatagtgctgttgtatatccaccaattttaaggaattgcggacaaaaagtgttcactagtactcctaaaaaaagtggaacaagcatcataccacccggtattttatcaagtgttttcttaattgggatttgcatatatatatacctcctaaaatcttgttttttatttttaaacctttacatatatctcatgataaacttctacttaaacaatcctaatttataattttgttagacataattagttataatcgtattttatttagaatttgtacatgccacaaatatagtaattctaatttcttactttctaataacatgtacaaatcgaattcagctattttctcgcaactccgctttctattgcagcatttgcaattgcttctgatacctttgtagcaacatttttatctaaagcacttggaattacattattttcatttaactcttcatctttaatgtatccagctatggcatatgctgcagcaagcttcatttcctcatttatttcttttgctctaacatctaaggcacctctaaaaatacccgggaaagctagaacattgttcacttgatttggaaaatctgaacgtcctgttcctataactcttgctccagctgcttttgcttcatctggcataatttccggtgttggatttgccattgcaaaaattattgcatctttattcattgctctaaccatttcaggcttcaatattcctggagcagacactccaacaaatacatcggcaccaattaaagcatctgcaaggttgccttttatattatctgggtttgttatttctgctaaagcatctttagcatcatcaattttttccatgcctctatataaaatacctactttatcgcaagcaattaagttttttactcctgatgataataaaagcttagctattgcagttcctgcagctcccgctccatttactactacttttatatcttcaagcttcttatctactactttaagtgcatttataacaccagcaagaacaactattgccgttccgtgttgatcatcatggaatactggaatgtcgattaattttttaagtttttcttcaacttcaaagcaccttggtgctccaatgtcctctaagtttattcctccgaaagttggagctattagtttaactacattcacaatttcatcaacatccttagaatctactaatatagggaaagcatcaacatctgcaaattctttaaataaaattgactttccttccattacaggcattcctgccattggtcctatatctcctagtcctaacacggcacttccatctgttactactgctaccagatttccttttgatgtatatttgtagacgttttcttgatcctcatgaatttttctgcatggttctgcaactcctggcgtgtatgcaagacttaaatcatctcttgtttcaatcttaaccttagatgtgattgaaatctttccttgtttttcttcatgtaattttaaactttcttcaaaataattcatttaaaacatcccctctatatttaaacatttacattcgatacttaatattttgttgttgtttggtgtaactagataatatcattttgtctgaaaatttaaaatattaagtaattttaatttatgtttagtaaattaagaatactttgtattttttttaacgagtattttaattgccctaaataactttttcacatagcatcaataaatatctttttagacatattagcttatgtactatgcaaatataaaaaaagcatatcctagaaataaaaaaacaaaatgaagatcctattcttttgaacacgatctccattttgcattttcataagccattatttaacttcagtttatatgtgtaattcctcccaataaaaataatatgaatatatggataggataataaaaataaaataaatattttaatccacgtcccttttttccattataaagcatcattagcggtatagcgaaaatcataatccactgattgtaaccataaaatatattcttaaatgaaaaactcgcaaatggaaaaaacgatactgaaaaaattgcataaacaatcatcattttttttctgtcatttcttaaataaaaaaatattattccgagagcaacaaatgaaacacttccttcacaaagcaatggacaaggtaaaaaggatataataattccagctatgttttttgaaaatattgaataagtacttattggtaatacaacttcaaacattatcgctaaaaaaataatataaattttcctatacaaatctttgttttcatctcttaaatattcaattagtaatatatttaatgctatcaaaaagaatgtctcgaatatattattactcactggaaaatatgatggatcatcaactgatatcttccatgaaataaattttcctaaagacattactattgaaaataaatataatcttttaacataagtttttctattccctgtataaaaaaagccttctgccattgtaaagaaaaaaagtggagccgataatctcccaatccaattaaaccaaattggaattccagtcgatgctaaaaattcatgcatatgatccattgtcattaatactaatgcgattatcttcaaagaaaatccactaaagcctttttgaataatattattatttgctatatacatactgtatctcctagctattattaaaatttcatatgtaagttcatgcatatttattaataactatttatttagatatgttccataaacttatttatgttattatctatttctacttctgaaaatacaataattgttgttgttagtgaatattctgatatatcatttataaactcttctatctcttctaaattctttacagataattttactaagaaacacccatcccctgctatcctatatccccattcacttcttctatgatttttaataaaatttttaaatttgttatattctccgttcttcattgtaatcttcattatacaatcaattgataatcccagctttttcttatttattctaattgtatagccttctataattccactatcttgaagtctgttcactctctctgtaacggacggaggtgataaatttatgcgcttagataattctcttattgataacctactatttttttgcaactctgataatattgctatatctatttcatcaaatttcatatgtaacactcctagtatattttttatttcaaatataatcttatcattagtattatatgtcatttagaatgcaaataagactataactcctatataatattaattgttaatattatataaaaggagatttattatggcaagaatcaatttttcaaaagaaggaaatacaccatttcaaaaactattaggacacaataaagatattatgttaaagtggtctgatttagagaatcttcttttctctaccaatacattcacttctgaattaaaagaacaggtaagacgtattttggcatttaataatggctgtgaatattgtatggctaaaggtaagccattcaataatataaacgattcaaagattttagcagctaccaaatttgcaaattcattttcaaaaaattctatagttagcgatgaggatttcatccctttaaataatgaattttctgaaaaagaaatttcagagcttattgctctaatatgctttataacagcttctcagaaatttggagctactcttaatttacaaccaagttgttcaattaatatttaataaaaatacctactaaaagtaaattattttcttttagtaggtatttctatatatactgaagttaaattttatatttctctagatcatttttaaaggtttttgtaatacctttaaaatcagatatattatctataagtttttttatctcatttgtataatttattacactagcacttacttcttccgatgatgctgaattttcttccgcaatggctgccaacgactctatactatcatatacatcagatatagaatcagcttcaatatttaacttgcttatagtctcaatcatagaagttgctacactctgtactgattgattagcttcatagctaatatttcgtacgacgtctaagttattggtttctttttctaatacattatattgaacatctatgtgatccactaagaagcctatttctttaacaaattgagctaaattagagttaatgtcaagtactgcctctttggactgttcagcaagttttcttattgattctgcaacaacagcaaaccccttcccttgttctcctgccctagctgcttctatggatgcattcaatgctaataaattagtttgttctgctattcctgatactatagatacaatattatttatatctttagcctttccttcaagctgtgtacccttctctttaacttcattaaaactctgtaaagatttcaaaatatttttacttgcattttcaacattttcatagctgttattaatcttaagcatggcatcttcaagttctgatttattttcattttcgttttcaactatattccttaaggcttcgatatttccattaagcgcttgtacagctttatctgtattctgagcttgtgtaacagccccattcgcaacctgttcaacaacgccacttatttctgtcgaagtatgattcatcgaatcagaaatctcgtttatagtatttacaaaagtattcatttcatctgtaacacctttaaatccaacgaaatctgcctggattacttttttatgttccttaagtaaatcataaatttcttcaaagaaatcattagtggtaatttttccatcaatattgtattcatttttaattattcgttctatttcctcttttatttttcctataggtgacatcattaaagaaacacctacaaatgtagctaaaccagatactaagcttcctattaagacctttgtaatatcatttattcctaacattatcaaaaaaactatagctgatattatgaatgaaaatactcctgtctttgccccaaaactttttataatacccaaagaaaaaactctattaaaaaagtattttttattgtaatatacatctctttcaaaagtaagttttaatttaagctcactgcttgttcttgatatttcttttatatctactttctcgttaaagtgttcgcaagtcccttgaagcatgcctaaaaaatagtcaaacattcctctagaagaattatagctaaagatagcttccctactcgatattggttctatagataccaaaggtggcttcgctcctgcaaacttttttgtcatcactacatgtacatcgaacatcgactttaaaaatgaatatgcattgtcatgtttgaaaaatgccggataatcatgactaaaagcttttatattatcttgtccaatttttctccaaagagttcctacctctatattttgagatttagctatgtatgatattattttcttaacttctccatcgtctacattttcaataggtgaaaatatttttgtttttccccaacctatataatccattgcttcgttaacaattgagtctccaaacaactttctatttgtcttcatccatgttgatacaacggtacctttcataaatacattacctccttttctctttttctataacagtatttcatgccatttatcatatttcacgttattgtataatataattatacacttatttcctttagtcagtaaatatattactagttaatatatattattatttaatatcttcatatctttatttttaataaccatcgcaccattttattgacacaaaagaaatagtatggtaaatctaaaataattgaaataaattaattctatacagcttaattgcatttataaaattcattagatattagtattaacaatataatttaaacattaagtattttcttattagatttgttgttacttatctaaagtagtgaggtgattcagtattgatattttctaatcttaatataaataaagatgagcctatttatattcaaattgaaagacatataaaacaaggcattaaaaacggtgaattaaagaaagatagtaagcttccatctacaagggaagtaagtaagtttttgaatataagtagaaattctgtaatttcagcctatgaagaattagaaagcataggagtaataacaacaaaaagagggataggtacttttatctccatagaaagtgaaaatgaaagttatgaatataatgtagatttttctaaaaggattaacaattatggagctaccttaaaaaagtttgatattataaaaagtgaattgccgtataaaaagggaatgatatcattcaaatccatttctcctgaaagtcatctctttaatcttgatgattttaaaagatctctgttagatgcttggacttacgaagaagccaatctattaaattacggttatgctaaaggatataagccattaatagattattttttagattatatgagagataaaagagttgatactaataacaaagatatcttagtaactaatggatttaccgaagcctttgatatagtaattagttcgctaacaaataatggtgatattattttatgcgaagagccaacacataatacagctttaaaaattatgaaaagctatggattaaagatagttcaagtaaaaatggataaagaaggtctagacttaatatctcttgaaaatgctttaaataaatataatccaaagttcggatatttgatcccatcttacaataatccaactggaatcgtaactaaaactgaaagaagaaaggaaatatataaactttttagaaaatattctgttcctataatagaagatggctttaatgaagaattactctactcaagctccccaattgatccaatagcatcactatgcggaactggtaatggagtcatatatataggaagtctttctaaaatactgtttcccggtcttagaataggatggatattcgcagatgataagcttatagaaaccttagaaagtgtaaaacgtggaagaaatattcattcttcttttttagatcaaagcgcatttttctattatttaaaaagtggtgctttcaacagatatgttaaaaatgtaagaaaatattatagagataaatacaatcttgtactcgatatggttgaaaaatatattccatatgaatatataactggtgagggtggccttcatgtattcataaagctaaagaacaacataaatgcaagaactcttctagaactctgctataaagataatgtattatttatgcctggtgatattttttatgaaaattccaatgataatgtagaatttcatactaaaacagatgataacaagcctattagccatagaaaaaaaagcttaaaaggctatgatacttttagaattggatttggtcgagtaagtgacgaaaatataaaaaagggcattgcgataataggaaaaaatataagacttttggataattagtatctacttaaagtaaaaaaatcattgccacaaaattatggccaatgatttttttatttaacacctattataagaatttttactatatattttttaatgcctgcaaagcagctatatttagtaaactccaaggtttattaaaatgtggttggaagaagaaatctgtcattgcaagttcttctatagtcattttattttgaattactactgacaatgtgttcataaattgtgttaaatctaaattcgaaattatttgacctccaagtattcttctactatctttatcataaactaattttaataatgcttcttcgtaagtaggcataaactctggtctatagttatctgtaacagaaacagctcctacattaaatgatgttgtattttttgcaacttcttcagttaatcctgtagatgcaatacatttttcatatatcttaattcctgatgtgccttgtgttcccatatactttaatttaggctcaactatattatgcgcaattaaagttcccattctcactgcatttgttgctaaaggtatatatcgtgtatcatcagccggattgaacttaacaacacagcaatctcctgctgcgaatacatcttttctacttgtttgcatatattcatcaatcataattgcaccattttgaagtgtctccaatttaccttttacaagagcagtgcttggtgcaaagccaatgcataatataactaagtctgcctcatattcattattatcagttactacatgtgaaactttatcattatctcccttgaacaatttaactttttcccctaaaactaggtttattccatgatttctaaattcattttctgcaatatcagtaaattctttgtccaagtacttagacattattctctcttcagcatcaattaatgtaacatttttattctgaattttgaaagcttctgcaagttccacaccaatgtatccgccaccaattacaactacattctttgcatcactacgtctagcttcaatttctttcgcatgattatagttcttacataataaaatattttgtaaatttccgccttcaaacttaggtattattggccaagaccctaatgttaaaactagcttttcataactatcttcaaatatttcaccattttctaaattcttaactttaacaattttattatcaaagtcaatatctaaaacgtcatgtttcatctttgttttaactcctaaagagctcaaattatctggcgaattataaaataacttttctgtttcagtaactattccgcctatacttaacgcaattccacaagatagaaatgatatattatcgtttctttcataaactacgacatcactatctgggtataattcctttaaattaacaatagcagctgttcctgcatgtgtacatccaattacaataaccttcatatcatatcctcctgaaatcttttcgataatttttacttataaataatagttattaactaataatattatatatctttattcaagaaaaataaagaatttttcttaaataatataattattctctaatatccattttgcaattaaatttctacattcgctaattatctatcacctagtgtgataaaagttttataatgtagatttgtcattgaaacataaatatcttattaattatctatttatgatatattttatacttcccattgaataatatacttaatatacttaaaacccttattctatctttttaaagttcaatttttccattacaagatccaatttttttatatcaataggctttgtcgcatatacttcacaaccattgttaaaaatacttttgactaagtccgcatcatttagagctgttgtcattattattttaactttcttattattctcaatatctttttgcttttctatttctcgaatagtctttagaaccttcactccatctacctttggcatcattatatctaagcacaccaaatcataaggttcgccttcatctaatgcaattaaataggcatctaatccttccattccatcaagtgtgatatcgcactcaccatacttggacataaatttaaacaaaagctttctacttgaaagatcatcttctactattaaaattttcactgttaagcccccttataaaatatatagtataaaacttataaactatttgtaattttctcgtagttatttttaattcccaactcatctttctttcttgccgcaagttcaattttaaatgctaaaatcttaatattattcaaactgttttcttcacaatattcttttatttcatgagctatattttcaatcttaatgtaatcttctagcgttttttcttcaataaaatatctctccatgctatataaccattttaacaacgtctccttaatctctttatcaactataataaaactattattatatgtagtatttcttaagaatagttgaatggtgctttttgcctctaagtcgatgttctttagagtcctttctaaaatttttttaagtttatttatatctattggttttgaaatatagtcatccatgccttgtgataaaaatctttctcgatctcccttcaaagcataggctgtcatcgctacaataggaatatgccctcctgtttttatttcattttttctaattatcctaacagtttcacttccatctaattcaggcaattgtacatccattagaattaaatcaaatctgtaattttcaataaacttcaaagcttcaactccatttgatgcaatctttatattaatatatcccagctctttcaacacttttttaatcactatctgattgatcttatcatcttctactacgagaattttttcactcttagaattttcatcatttattttttgatgatctaattctccaatatcatccattgccttatctaatttaatggcaaagtaaaatttacttccaactcctttttcactctctacttctatattcccacccattaattctacaagttttttggagatagaaagtccaagtcccgttcctccatattttcttgttatagatccatcaacctgactaaaactcttaaaaaggtgttgcatctcatctctgctaattccaatccctacatcttcgaccacaaactgaatttcatattcatttttacttttgtttatctttcttacttttataattacaaatccagattctgtgaattttacagcattagaaactaaattgtttaatacttgctcaagtctatatacatctccaactaaaacttgcggaatattctcatcaatcgtatagtgaagttgtatatacttttcattagcctttggcaagttagtatatattacatttttaataagaacttgtatattaaaattcacattctcaatcaagactttctctgcttcaatttttgacaaatctaaaatattatttattaatgataataacgaatgagcacaactttttacaatactcagattttctttctgctcttctgtaagattagttgaaagcgtcaaatctgtcatacctattattccattcaatggagttcttatttcgtgactcatatttgctagaaactcacttttagctctattggctgcctctgctgcttctttaagtttgaaaagttcttcttttgtcagtgctcggtcaaacttatacacattttctctttcattccccacaatattccccaacctttccctttagatatattaactcctgttaatactatccttattttagaggaataaaccgcttatcttatctcattctatataattaaggtaggaagcaaaacaaaaatttttcttaattttctcttcctacctttatctttgtagattagtatttaccaaattcactatcacttagttttattctttttttatttgaagtaactgccacttctttatctagcgagttgtctccactatcatacgattgtctcaatatatagttcttactatttttgcttactcttcctctcgagctatcatttttaagtttaaaactagaaactaaatctttaagcaattctgattgacttgaaagttcctcactagctgccgcactttcttccgccgttgctgagtttgtttgaacaacttgtgatacttgctctattcctaaatttacttgtgatattccagtagcctgttcatctgaagatgccgctatttctgatacgagagtcgctgctttagataccccatcaactatttcgtataaagcttttgctgtgttattagcaatttcagttccattttccgatttctttatggaaccttcaataagagctgttgtttctttcgctgcatttgcactcctagctgctagattcctaacttcttcagcaactactgcaaagccttttccatgttgtcctgcccttgcggcctcaactgctgcatttagcgcaagtatattggtctgaaatgctatttcatctattacctttataattttagaaatattggctgaagattcatttatttcactcatagatttgagcatttcattcatatgcctacttccttgttctgcatttacttttacttcaagagctaactccttagcctgattcgcattaaaagcattttccttagtttgtgctgcaatttcggttattgacgatgtcaattgttctatcgcacttgcttgctctgtagctccctgtgataataactgactaccgtctgaaacctggctcgcacctgtataaacttgttctgacacattatttatttcactaagaactgaatttaacgagtctattattgtatttagagaaactgatatattattaaaattaccatgaaactcttttacattttcaatattgagattaccttgtgagatttgtcctattatatcagagatttctccaacaacacgttttaatccatcttcggtctcattaacagctttagctaaaattccgaactcccctttataattttcacttacaggaacatcaaggttacctttagatatttcactcataacacttgtgacttccttaattggttctaccatagctccaatcaattgatttacaccctctacaacctgtttgaagtctccactgtgttttgtttcctctgctcttatatctaatttcccttctatcgcagcatttgatagcattttagcatcgaatataagattatctatcgcactcttaacatcttttaaactattatatattccttcaaattgtcggctaacttcatcagtaaattgatctgcttctttaatttttaagtcaaaattagtatttccacatgccaaaagctttagatttccctcaagtctcttaacttcaccctttgtataatcgcttaccctaataataggtgttaaatcagttacaacttccacatatcctacattctcaccatttttattctttaagtaagacgtatcttgcttattgctcatgccacaccattcaaagaaactttctgatttccccttatgtagctgttttataccacatttttcggtattacatatattagcccccgcatgactacacgccaatccgtaaccagattttcgatctctaatgacaccttgattaatcattaaattttcaaatgacttgttcatatacgtccaattcatatcattgtctgtaacatgaattgggaaaggtatagcatctataatagcctcataccaaacagccttatctactacagtatctaaagttccatttactccatctattacttttctgaaatctccttcatgttttcctgcatcagctcttgtttcaaactttccttctattgccgaatttgataacatatttacatctgtcactagcatccttacattttttacaaccttatttaatgcaggagctatttcatctttttcatctttcgcaactatattaatatccatgttacctttagctattttattcatagcccctataacatcattctgtaatgtgttagaaaacgagtccataaccttagccatttgtcctatttcatcgttagttgatatgtccactctttcaccaagatgccctttactcatttcaccaagaatagttaatactttatttatcggtctactaattaatcccgatattataattccaaatactaaggcaataactattcccatagaaattactacaagcattataataattgcactactcgcagcttttgaattaatgtcagccttcactttaccttctgcttcttttagctcaataagtttggtagctgaattatcaatattactagagaatatgcctgcatcaccattcatgatacctacagcctctgtatctttattttgcaacgctaaatcaataaatttatctctaagtggtctgtatttatccatatttacttttaaattattatattcattaactaattcttgatctttaagggtgagcttaagctcttccatagctttatctatttcttcatcatttttagatattatattcttactttcattatttttatatgtatcagtttcaattaacaaagttctacacaatactttatttttttgtaaatttacctgtatagtactggcaaaactaatagcttttgtgttgtcttcatatagatcactatctaatttactgattttttgtaaattaaaaatccccaccgatcctacaattcccattaatataacaattcctaaaaacgccgttaaaattttactccttatctttaaattcaaaaaccacttcatattctttacctctcatcttcttcaaattttatctgaacgtaatttcatttaaacttacttaatatgctcttacaattattaattttctccattctttaattcttctatttcatcatcttctaaaagcctattacaatctataagaagccttacttcattctgaatctttccaataccctttatataactatttgaattgtgtttctctaaatttacttttggaggaggagaaatattactttcatcaatattggcaacctctataactttatctattattaaaccgatatctatattttcaatttcaactacaataatgcatgtcctatcgtcatattctttttcctcttttttcagtttaatcctgacatccatcactggtattatttttcctcttagatttattacacctttaatatacttaggtaattccggcacctctgttattggctcaactcctattatttctattacatatttaatatcaattccatagcactcttgaccgatcgaaaatattaggtatttatccttttgagtatcttcttcattttcaatcattacatccactaactctgacattctaatcctcccataacgcaattttataagttaacaatttcagatatatctaatattaagcttatagttgcatctcccaataatgaacaaccacttattgctttcaccttttttatatattctggaagtgccttaataacaacttgttgctctccaataagttcatctgcgaaaatacattttgctttaccttgatcttcaaccataattacaataccatcttctatatttactacattagtttttatattatagaactcatgaagctttaatatagaataacattctcctcttattaatatcatttcattattatctatatctcttataatatcttccttttttataatgaatgattgccttattgaagtaacaggaatagtaaaaactgattttcctacctttattgtcatgccatcaataatcgcaagagttaatggaatttttatagaagttgttgtttcttcaccaggtatactatcgactgtcacaatccccctgattttttcaatctcatttgtaaccacatccattccaaccccacgtcctgaaaattctgtaacattttccttggttgagaaaccaggtagaaaaatcattgaatatatctctctatctgtcaaatcgttttcctttacttttagtagtccattatcttttgccttttttaatatcttatctttattaaggcctttaccattatcttttataataatccaaacttctccaccagtgtttttagcctcaatagttatttttccaattgaaggtttcccatttgctaacctctcttctttggtttctattccatggtccattgaatttcttactatatgcattaatggatcacctatatgctcaattatatttttatctacttctgtctcttgtcctattatttcaagttctacttccttattcaatttcttacacatatctctaactattctattcattttagttaatgtcgaggcaagtgataccattcttattgacataacaacatcttgaagatcagaaagcctttttctatgctgcctcgctgccttattaaaactatccaattgcaattcagatatttctggatttttagttaccatcgcttctgaaataactaattctcctactaaatccattaacttatctaatttatttacatctacgctaattaaactttgtttatacgataagcttttagaagctactttctcattgtcatttgtatcattaactatattattaattgactttataatatcttcttgtggtttttcgttcttcttactaaattgctcactaaattgctcactgaattcaatttcactataaaatttgtttatatcaacattattcaaaaaagcattttccatcaaaagtgttctaatatcctcaatactttgatttgtcttgaaaaatattttaaatccctgcttctttataatttcacacgtatcattattttcaataatatcttcaggataataatatgaaacttcagaaatctctttaagctgatgcacaacagtaaagcatcttatattctccatatcacattcttcatcaaaaaacaaagtagcactaaataaattaaggttcgaatttaccctatcagtgcttaagtaatatttttgttctacatcttcctcacttactaattcatctgccccgccatttcctgaatcttctgaattttcatcgtatgttttaaggagttttaaaaaccccttaactttctctataaataaagtaaaatctccatctgtgtctttattattatttattttttctgtttctatttttattaaatcgcttccttctaaaactaaatctgtaagttttgaataatctattttccctggctttgattctctaataaaatagaataaatcttctatagtgtgagaaagattagaaatgttatcaaacatcatcatcccagaagaacctttaattgtgtgcattattctaaatatttcatttatagcttctgtttctagtctcttattcttttcactatcaataatgagttgctgaagttgttctatcatatcaaatgtttcgaatataaacatttctagcatcggttctctagtatccatgcttgtcctccttagtaaacactcttaaaacttgcttaatgctttaacaagataatcttctttaaatggttttactacgaaacctttagcaccttgaattacagcttccctaattttggtttcttgccccatagcacttaacataattaccttagcctttgaatcaaatttcattatttcagttaatgcctcaatgccatccatatcaggcatcgtaatatccattgtcacaagttcagggtttagcattttatacatttcaacagctttacgaccattttctgcttccccaacaacttcataaccatttttttcaagcattgtttttaaagataacctcataaatgcagcatcatcaactacaagtattcttttcataaataatcccctccagtttcatcataacttcattaagataataatatttcaatccatattattacataatccttccaatctatttaaataatagccttttataaattatattaaaaataattgcaagcatattttatttgcaaacgtttataggtgaaatacttgcacaaattggttgtattatgtaaacaactatctgattataatttaaatgatttatctttaaaagtcaatgcttgtattattctgtctgtttgttctaaaaattaagcatatttgtatattcttactataccaatgtttcatatttacaacatttttttagcataatattattttttatcaaatcaaacataaagtgtaaaataagccagtataaataataaaacaactatccaattgccctctaattggatagttgtttatatttggctgataactctcaactaattttacttatattttaattctaaataaatttatatacagtgaaaaatatataatttatattagtactgctaaaattactagtgacataatttcaatatcatactcagttattaattatattgctatattaatttaaactgttttaatcctttataaataccatcattttcaatattatctgttttatattttacaacatcaagaatctcaggactactgtttcccattgcaactccatatttaacatatgttagcatatctatatcatttaaactatcaccaaatgcatatgtattttcaatatcaatttctaaacgctctataatcgcctctattccctttaccttagaaaatccttttggtactaattcaataaattctgaactatgacatatgcagtcaaaatccttttctattattgaatatgcttctttaaaattactattctcatatgttctgcatgtaattttattgaaactatgttcatttcctgttattggctttattttttccctatatttatttttaaacatcattattgaagatcttttatcatcgataaattcctcctcatccatatataaataatcttgtccttctagaatgcaaaataccttattattttttaaagcacttattgcattatccgctatttgcttttccaaatctatgttataaactacgtttccatcatattctacataacaaccacaagatgcgagtattccatcaaacccaatatcaattagatcttgtgaaatcattgctcttgcccttccagttgatataaaagcaagatgaccattctcccttagctgcctaataccttttattgtactctttggcacaccaacttcatgattatatagtgtcccatctatatcaaaaaaaactgccttctttcccattcttacctccttaaaaaacaattacattcacaactatatcatacattaataacaaaaaaagttaaaggtaatatatattatttactttaaatatataataatgagagctaaattttccttaaaatatgttgcaatttaatttcaaatgtataaattaatactattaagaaagataaggtggtatctgagtggatataaagaaattaatcaatgaaatgaccttagaagagaaagcctctctctgttctggaaaaaacctttgggaaactaaagaaattgaaagattcggaattccttcaataacttttgcgaatggtccctatggattatcaaaaataaactgtgattcttatgaccctgttccagctacatgttttcctacgcctactgccttggccgcaacttgggatgttaatcttgcttattctgtcggaaaagctattggtgaagaatgcttagctgaaaatgttaatattctctttggtcctgctgtaaatattcaacgttctccattaagcggaagaaattttcaatatttttcagaagatccagttctaagtggtgaaatgggtgcagcttttataaatggaatccaaagtgagggtattggcgcatgtgttaaatattacattggaaataaccaggaatcacatagacaaaatattaataacataattgatgaacaaactttaaatgaaatttatttatcaaactttgaacgggtaataaaaaattctaatcccttcgctgtaatggttgcttacaataaaataaatggaataccttgtaccgaaaatgactatttgttaatcgatattttaagaaatagatggaattttgacggattagttttatcagacttatatgcagtaaattcaataataaattcattacaggctggattagacttagaatttccaaactcacctaataatacaaaacaaattatagaagctgtacttagtggtactttagattcatcaatccttgataatgctattgaagatatattaaatactatatctaaagttattaaacctgtaaaagaatgtgaatgcaatatttatgacaaagaaaaacataatgatttagcaagagaagttgctgaagatagcattgtccttttgaaaaataaacgtaatcttttacctttaaaaaaagataggttaaaaaataggaaattaaccataattggagaatatgcaaaagaaacaagatgtcaaggtgatggtaattctaacgtcatacctataatgtttgaaaatgcctatgatgaaatagtaaaactcgtcggaagttccgtcaaaatatattatgaaaaaggttataatacttctaaaaattcagaagatgatgataacacacttcttgcagaggcaagaaaaactgcacgtaccgcggatatagttatattatttgtaggaactccagaatactatgataaagaatatactgacaaggtaaatctagatctccccactgatcaagtgaaattaattaaggaaataggtaaagtccagaaaaatttaattgtagtacttagcaatggatctccagttactatatcatcttgggccaaatatgctgattctattttagaaacctggcttccaggacaagcaagtgggggtgctcttgcagaagtcctatttggcatcgctaatccatctggtaaattaccaactactttccctatacaattgtcagacactccaacatatttagattatatagattccgaaaataatttacagtataaagaagggctttttgtaggctatagatattatgataaaaaaaatatgaatgttgaatttccttttggattcggattgtcctatactacttttaaatatagcaacttaactcttgataaagatatattaactgataatgatacattagaaattaaacttaaagtaaaaaatactggaaaatattttggtaaagaaattgtacagttatatataaagcatactgatagtgacattttaagacctgaaaaagaattgaaagcctttacaaaagtatatctttttccagatgaagaaaaagaggtgagttttttgattgatacaaaagatttttctcactatgatataaacacaaataactgggtaattgaaagcggcccttatgaaattttaattggtaaatcttctagagatcttcctttatctaaaaacatttatgttcagtcaccatatctacctaaaactaattatactagagatacactcgcacaagagtttctcattaatccaaaaactaaggcaattgtagaacctttattaatcagcgccgctcaatccataacttctgatacaaatgcgcaagaaaaacttataaattactttaaaaatattcctataggaagattcactacattaagtaatggaacattcaccgaaaaaatgctaaatgatcttttatattctgcgaatgaagcttaattatagaataccttcatttataattcaaaataaaattacaacaatatatctaaaaactatatattagtgtattcacattaaaaagaacatgtttcatataagtatttatcaacttaataccaaaacatgttcttcattttcattattatatttatataacagtttttatagattcagcaatgttttctgctaatttttgctgactcactggatccgaacaccttttcgcctcttcctcgttagttataaatcctgcttccacaattactgatggcatatttgtgctttttatgaatagtctgctatcctttgcacctctatcattaaaattaaacttcttaacaatattgttatcaataactgttgctacgttcttacttatcgttaacttgttaggacataccccacctttaaaattttgactttgctctgccgaactataataaacttctaccccttttgcgtctggagcatcctttacagcattatggtgtatacttacaaataaacttgcatttgctgtattggcaattgtaattctatctttaagactctgattggtccctatcgtttgtacttccttaggatatctagtcattacaacattatatcctcttttctctaattccgtttttaacttagatgcaacctgcatatttaaatctacttctttatacgttatgcctttaattgtagatgcagctcctagatcaccaccgtagttatgacctggatcaaccactattgtctttttctttttatcaaggttagctatagcggtcattgcctggttgcttaaagtgctttgtgttaatgttgatgcttgtacacgtattgctggagccaaacttgacactattgcaaaaccaagtacgaaagtaactaatttcaccttaaaattatccaactttctcatcccccctctatagtaaatattaccagaatagtttacataattaaagaagaatttgaaaattttaactttaatgcattagaaagaagactaatgcattcatatagcttattgttcaaaagaaccaacagttggtgtaaactcttctaaattaagctttttttgataataatttgttccccatacacccactagaatcatcactgatcctattacatggtataattggaagttttcatgtaatacgagcacaccagctgcgatagatactatagttgatatattggcaaatacagctgatctagaagcttccattttagaaagcgtataattagccagaaaatatgctacaactgaagataatattccaagatataatatagatactataaagtttatacttcttaatggtataaaatattctgataaatttgcatttatcacgtgattagtaattgaaacaatattaaaaaatatagctccaataagcatcataaagtatgttacttcaatcgctgtaaattgtcgtgatatttttcttgctattatattaaataatgcagctgaaaatacagctcctcctagaaggataattcctaatagagtactccctcctgaatcattagaattttccataagaattatcagtattactccagataccgaaagtattatacttacgatttgcttaggagatggtttttcttttaatagatacacagctaaaactgtcacaactattggtataagagcaatcataagtccgcctaaagacgaagatgttttcttaattccataggtttcaaatataaagtaaactataggctctataacagccaaaataataagccatttcataggcttatttttataatttacctttattacttttaaaaatatcaaaattgtcattattagcaaagctgctaagaatctaaacgaaagtaattctgttggcgtagctacacttaatgcttgcttcgaaaataagaagcttaatccaaaaataaaattagttattatagcagtaaagtatggaattatatgtgatttatttttcatatttatgtcatttccttccttgtacatagatcttaaaatatgaacttaagaggtcaagaactcaaaagttattatagatcccttaaatatataaatttccaagtaagtatactataaaaaaataccatctacaacaatttatatagatatatctaaaagcactttcttgtttttaatattagataaaatggtattttaataatttaatgtaaaactttaaagtaaaatataaattaatccaatttttatgaataattctagtaattttgaaaaaaatataataatgagcatgaattttataggagtgaaatgtatatgaaggttggaattcccaatggattattaaattacaaatattctgcttttcttgagaagttcttttctgaacttggtgcagatattgttagatcaccagatacaaacaaaacaatattagatgaaggtgtaaagaattgtgtaaatgaagcatgtttgcctattaaaatttttcacggtcatgtaaatgcaataaaagataaatgtgatttaatggttatccctagaattatgcaattaaatgaacatgaatttatctgtccaaaattttgcggcttacctgaaatgatcataaatagcattcccaatatgccaaaagttactatggttcctatttatgcaacgtcaaaagaaaaattatataaatggatagtttcaactggaagcctaataacaacaaacaaaaaaagaattcgggatgcttatgataaagctttaatagcacaagatgaatatgaaataggaattaaaagcgatggatataaattaaatatagctctaattggccatccttacaatatttatgataaatttgtgaatatgaatttagtgaaaaaattaaataaattaggtgttggtattataacggaagaatttatagacgaagcctctattgctgacaaaacaactgaattatttaaaagacctttctggacatttgcaaaaaatgcttatggggcatctacatacttagcagaaaataaaaaaattaacggtatagtatacatatcttcgtttgcttgtggtattgattctgttgttatagatcttataaaacaaaaagtgaaagattttcctttcttagtattaaaagttgatgaacatactggagaatctggatttgacacaagaatagaagcctttgtcgacatgttagaaaggaagtaatgttatgaaaattatgacgcctcatttaggaaatacatatctggttactaaagcagtgtttgatactcttggtatagactatataattccggaattcaacagtaaaaaatcattagaaataggatctatgtattctccagatgatatgtgcctcccatttaaacttatgatgggaaattacatacagggaatcgaacaaggcgcagatacaataataattactggaagctgcggaccttgcagatatggagaatattgcgaactccaaataaacactctaaaaaaattaggacataatttaaattttattgtattagataaaccgtcagaaataggcccaaaagaatttctaaataggatatcttccatctcatctagcagcgataaaaatatgccgcaaaagctaaatgcattacgcataggatttaaagttttaaatctaatagataaaatagaggcaaaagcacattacttagcagggtatgaaaaaaataaaaatgaatgtaaaaaactcttaagcaattgtaaaattgatgccgaaaatagtaatagtcctaatgatatgataaaaatactaaacaaatatgataaaagactagattccctagagatatgtagtgataggaatccaataaaagtagcaataataggagaaatctatacaataatagagccattttcgaacctttttattgaggataaacttatggaatatggagtttcaacccaaagaaaacttacgccaagttggtgggctaaaaactctattatgtcagttgttggaatgaattctttagacatacgaaaagcttctaaagaatatcttccattatatattggaggacacgcacgagaatgcattggagaagcagtaatggcggcacatgatggctttgatggtgccatacaaatattccctatgggatgtatgccagaaattgtttgcaaagctgtgcttccttccatatctaaagataagaatttccctattttaactcttgtagttgacgaaatgacgggggaaacaggatatattacaagaatagaagcattcctagatctattggaaaggagaaggcaaaaatgtattatttaggtgttgatgttggctcagtaagtactgacattgttcttttagataataatctgaatgtcgtagataaactatatttaagaacaaaaggaaagccaataaatgcgatccaacaggggtttaaaatcttgaaagagaaatatgatgatgaacaaattaaagctgttggtactacaggtagtggaagacaaatcgcatcctctatccttggagcagatgcagtaaaaaatgagataacagctcacgcatgtgctgcacttgctatagataacgatgttaagacaattttagaaatagggggacaggattcaaaaataataatattaaaagatggagttgctatagactttgcgatgaacaatgtctgtgcagctggaactggatcattccttgataggcaagctgaaagattaggaattccaatagaagagttcggagattatgctttaaaatcaacaactccactaagaatagctggaagatgtgcagtttttgccgagtctgatatgatacacaaacaacagcttggttataatgagcctgatattataaacgggttatgcgaagcccttgttagaaattatctcaatgatattgggaaaggaaaagaaatatgccctaaaatattctttcaaggtggtgtagcagctaacaagggtatgaaggcatcttttgaaaaagctttaggatgtgaagtatacattcctgaacattataatgttatgggcgccataggtgccgcaattattgctaaagaaactgttgacaagaccggcgctactaactttagaggctttgatattgctgattctagttttatatccactagctttgaatgtgaaggctgctctaatcggtgcgaagttgtacgaatagaagatgatagtataataataggatgctttggagatcgctgtggaaaatggaccaataccattaatgaaaatattactaaaggtgcttaatcataaaaacataattgtttcttacataattaaggataaaaaatacagactaagcgattgattttaattacttagtctgtattgcaatataatattaatctcttttatatttttttcttatataaaaataaactggaagacctattaaagttattcctattccatatattgcacttaatgaatctgttataaaagtacttattaatatgtacagcccaccaactattccgatcaatggaacaattggatataaaggaactttgtatgaagtttttaattctttatgtttacgtctcaatataaaaatcccacatacgcacataacaaaaaatatccacattacaaacacagccaagtttgtaagtttgtcaaaagatccacttaatacatataaacttgctagtaatacttcaaaagcaaatgtatttataggagtctcaaatttttcattgattttcccaaaaaatttaggaaaagggaaaagattatcctgagccatagcaaaaggtattctaacccctgtcattagatatccatttagcgctccaaaaatagaaatcattatgcctactgcgattaatgcagctcccatatttccaaacaatattaccgctgcatctgaagctggcttggaagaaagtattacatcgttaactggcattatatttattattgctacattaattaatatatacactattattattgctattaatcccattattattgactttgggagatctttttctggatttttaagctccccagccatatttcctacgctaatccatccgtcgtaagcccatagagtccccagtattgcagctccgaatcctgctgctcctgatgtatttgaagcaaatacagttgtcgagaaatcatgagctgtaccatttattaatccaaatataacaataaaaattattggaacaagcttaccaattgtagaaattacttgaaccttcccaccaagtcttgatgatagaacatttaaagccattacaaaaaatagaatgcatatagcgaatattttctgcatcattggtgttagatctggaataaaatacgttgcttgagtaacaaaaactattgataatgcagctgccacccctggcacatagattaaagtctgcatccaaccaaataaaaatgcccatttttcactatataattccttaatataaacaaaaactccacctgtcttaggaattgctaccgcaatttcagcaacggttaaagctgaagctatagttatacatccaccaatcagccaagccattattcccagagttggggtacctgcatttttaaatactgatgacgccttaaagaaaattcctgaccctataactacacctataactatagtaatagcttcaataagtcctatttctttttttaaacctttaggaataacagtttccttattcttttgcgttgattcattcatgctagtcatctcctgactcaattttaaattttatatatataatattaaataaaacactttttctattgtataattcgtaatgaatttcgtcaacaaaaaccataattatattattttgcaaaaatataggcctcatcattttcaagtataacttttaaattatctttttcatttccaagtgagtcgaaatcttcttttttaataaacaataatgttttatcttcattatctttcaaaaatccttctataccaccttctagcggagtcaaatctgcataaagctcactatccagccaatagctttgctcaaaatgatttacatatattttttctccataatattctggcaagtttccgatttccttaataagctcttgactcaagtcctcttttggatttaaaattctagttactataacttcttcacttttatatatcgataatataatcatagcaaccaatactatttgtgtagcaaaatttctattacgctcttttaatataaaacctgatgcatatcctatccatattgctgcggcaggatatatcggtaaaacataccatgaaattttcgtttttgaaatagtatataatataaacggaatactcatcgacagccatattatcaaattacaatttattagtttcctatccgtaatatatctatgggctatagttaaatatgccatgctaacacctacaaatacaagattccaataaaaatatgaccattgcaaatgttcaatatagtaacactttcctccaatatgtccttctaaaggtcttgatgttcttgccatcaaatcaaattctatcatagtcttaaaaaaagctattccgtcattggaatatctcaagattgcccatataagaatcggaaaagatgcacttaatactaatgccagaatttgctttaatgttaatttaaataaatttttactaaatattaaatataatattcctataaaaaagatattgcctgcatgaaaacttttacttaaaaaagctgctgaaaatgataatccaaatacatatagccatttagtactcctttccattaaaattaaagacattactgatattgtaaaaaataaaacgtatatggcatctgcatctccggttcttgcacaatgctctgtaataaatggtattgttgttgttaaaacaattgtcgcaatcagagatgtcaatctcccatatatattgaaactaaaaattgctacaagtactatagttattattgctgcaaatgcagaaaatactcttagtcctaaagcattaaatcctgcaattttatatcccatagctattgcccaaaagcttattggtggtttcaaattccaataatcatttttataagcatatgtatttactatataattgctattttttatcatctcataagcgctaacaccatgtcgtgcctcatcccagctatatataggaatgacacctaaattgtaaaatatattaaaggatgcaattaacaatataactattaatataatgtagtaacatttttcaacaagccctataatattatcaattaactttgttctaaacatgctcatactttgctctccctgtaatatacttaatattttaatttcataaaatcatttactatattaaccttagcttgaaaaatatatacattcttaaaaatgtgaatcgtccttttccataatttacacccacaaggaacacaatgtccacagatttcattacaatataaattcataaagaataaaaaaataactttcagtctagaaccaaaagttacttttataatcaactattacattattaccactaaaattaaatttttccctttaattaatatttatcaaccacagtacctaagagagcatgttttataataggattgttctcgattgcctttagttcttttggacttccaaccactacagctccaattattctaatatcactctcatcgatattttttatatactgagtatgccctatatcctttaactgtttaatcgctgccttaaagttctgcattctaccatctgtatcacttctaaactctcctgctccatcaatagattttatcccaataacatcgaatgctggattattaacttcaattgtttgcttacaatcttctatattcctcttgttttatttgattagtttttaaatagtagttaatttgattaagcaatttttctttatcttctggtaaacttcctcttagagaaacataatttgatgcgtgattgcatctaaatgtaactgattcattgacattaatatgttgtattaatatccctatctcatttaatatttctctatcacttagaagtttaaattctttccttaatattttattatacaaatccgtttcttcttcaaccataagagttaatacgcctaaataatttggagccatatcgcttattaatttgcctgttttgattgcatgaatatcgctcttttcaatgccaccaactccagctataactgtcactgatagtaagatatcagcatttttaaccattctagcagcatcaattatctcgttactactcactcctttatttatatcgtttaaaacctcatcgcttccactttcaacgcccatatatatcatatataaacctaaatctttaagttctttcaactcttgatgagttttacctaatattgattttggtgacccataaagcgttactctcctgcattcagaaaatgtatttcttataagcgttaatatttcttttaatttttccgttggaatgattaaagcatcaccatctgccaaaaatattttttctacataagaatacatttctctaaagtaatttacgtctgctttaatatcttccaaagattttattgtaaattttttagatttatacatattacaaaaattacatttattatgagaacaccctaaagttacttgtattataagactattactttcacttggaggcctatatagtggataatcgtacattatcaaaccatctcccctgttattctttaattaatataatattttttaagttctaacactatctacatatatatttctacttcattaaattctttataagcatttattcttaaattagtgatattctaatatatatttatccgaagtatatttacttgcatttcatatgatagcatcaaactcataaatataaccttctatagattttactacagaaggttatatttatgaagtgcgttttctaatattaatatttatataacataactatactctgagaaccagatccaatagtccagaaaattacatagtcccctcttttaactttaccttcctttatcgattcatacaatgctatgaaagggctagtagttccagtatatccatatttatttcctatatagatactcttatcttctcctatatctaaaagttgtcttatattttttatatttataaacgcaaactgagaaaagcaaaacatcttaatatcttcattttctaagccatttttcttcagcatctttttagcaatctctgctgcgggataaacacatgccccaccatcaaatggcaaccatttcaaataaagttcgcttacatcttttgatttgaaaaaattagagaatccttcacttggatacataatgttatgactttcctctgtgtttatataatattctgcatcaactatcccacactcttcttcaactttttctaaaattattgcacatgcagcatgtccataatttccatagcaaagctcattatttgggtcagctaatgaatcaacatcatcacaaccaataattaatgctcttttagctcgcttcgacgattctaaataatttgacatattctctaatgcaacagtcatgccagcacaattagcattcatatcaaaacacattacatttcttcctgcatttaattccttatgtattaaaatagatgttgctggtgctacatattccgataatatagatgaataaactagtacatctatatcactacctgtcaagttagccttatctaatactgattttgctacttttactgctagagataaagttgtctcctgttcattaaacataaatcgtttatctctacccattatatctactaataaatgttctacatctttatcttgtttttcaaaatgttttaaataaatatcatttgaaacaacttctgatgcatgacaaacatcaatacaacttagtcttattcccataataatctcctagctaatgtaattcaatttaatattataaattatgtatcattttaaattatttcaattaccaatccagtgttcctacttattcttgataattgcatctttaaagtaatattgctaccaacatttgctataacctttacaaacttgcaagccttgtacatttgaaaacatccttctaacattggtaacatctcttgtcttgaaacgtttaactctcttgcgtcaaaattcaatacatattctgaagtttgtataggagatagttcttttctaaaatcttcaacaaaactattggcatcgtttggttcaaacattccccatatccttatattaatctccttttttgctttgtccaaagacagttgatactttttcatttactacacctaacctttctttatttaaattgttaccatatacacatatttcaatgattttgtatcaaaataaaaaggtacctattaattattaataggcaccaaaaataaacaaatgactaatgtttatataactacattttggcaacctggcaatcattgaaaatgaatttctttagacccatagctttgcggccctacctttcggcaagtgtgctattatcaatacatatgatatgcataattttacacttatttttgataaatttcaatatttataccaatatttttaccattaatggcattaaaactaattttagtaagttatatttataatttctacttattttgaaaagattccttgaattctttcttaataactaggaaatcttctaaatcattcaaaaactgaaataataacgctctattttcaaattcgtttcgatttttaggcaaatccattttttcataatctttcctaagcaaatttagtttatctataagctctacacaatcattatcttccttaagattcattgcaacttcatttgtaaattctgataatattctagtttgatcataagtcatataaaatctcgagaaatgcctcttcattcttttcattgtatctagctgtattattctcatctctatataactcaaataataatcattttttttaaataaatggttattatttattatttgcgccataaatttagacttattaattaattcctcaacgctcactgatatttgcttttcataaattggtacagcttgagtaacaaggcttactgccatatctgataatatagctctataataatcttctattctttctttgtttttttcaaattgttcttccaatgatgcggtatataaattaaacatcattgctactccaattcctattacagttaattgtgcttcgtttataatccatgaaatatttatatttgtgcttgtaagtaaatgtgttgataatacagatccaactaccattccttcctctatttttaaaattattgttgtttgtataaatataattaaaaataatccgaatatgattgggttatttccaagtaataaatatagcataaacgacaaaagaatggctaatgcagaagcaattattcttctccctgcaactaataaagattctttttttgtatcttgaatacttaggattgcaataattcctgaagtcactccaaattgtaaaccaacataatttgatataataattgctattgtagctgataatgccattttaagagttttagattgtaaatattttatcatttttactttctcctaccatgcttaaattcttattcattatataatcttcacttttgcatgtagcttgcctttcatatgtatcttaactaaataacgctttttgcacacgtgttccagatttataatgaaatatatacctccttcattgagattataagaggcatatatttcattacctagaaactcttttcaactttttattttcatacattttataatcagctttccttaacatctcctctaaattatctgcttcactcagcttatagctagttgatccaaaacttatttctagtttatatgttttaccatctgaatcttctattatttttaatctttattgattatccgagaatagctcatttcattatttatattatattacactattatttcacttagtaattatgcacaatgctaacatatatctttttcttatcgtttttataactttggtatatccaactgaattcttttccattgctttctcctaagctactaatactaaatagtttgtttttaaacaaatcatcctacttattaactatatataatttactgattattttttactatatattgtctacattatcttatttccaacttcaatattttatttaaatattctccattttaacaagaaaattataacatattctttcattaaaatatcgaatttttaaacttaataaaaataaatgtattaatatatataattattaacattaaatacaacatcacattatttttcgtgctataagtactcgaattatttttaagtgaacttatcatgtaatattttcaaatagaaattatatattatgctttcgaatagtcatttagagattatttataaaattttttatatatgttaaactaattttataaaaatttaagggggggattaaattgttgaagatatacgaacaaatttcatgtgatataaaacaaaaaataatacttgatcaaatgcctcaaggtgctaaactaccatcaattacatccctctgcaaagaatacaaatgcagtaaaggaactgtgattaaagcctacgataacctatgcaatgaacatatagtttactcttcacctcagagtggattttacgttgctgataaccttgtacgatttaatacaaatcaaactaatatttatgacctatcgactggtaactctttagttagcaatatcccaataaaggacattcagcattgtctaaactcagccttagagctccatggcaacatgtctctaaatatggatttagaaggacttccttctctacgtgaactgttaactgatttacttatgaaggatgatatatattctaaaagcaaaaatttaattctatctcaaggtattctacaagtattaactcttttttcaaagatggaatttccaaacggcaatgatactatacttatcgaggatccatcttatacttattatataaactttttaaagtatgagaatatgaaagttaaaactataaaaagagatgagaatggaattaatttatataaacttgaagaaatatttaaaacccaaaatattaaattcttttatacgattcctagaaatcataaccctttaggcacttattattcattaaatcaaagaaaagcaataatgaagcttgcccatacttacaatgtatatattatcgaagatgattatttttcagatttaagcaccttgtcaagatattcacctctttactattactcggattttaggaattgtatataccttagaagcttttcaaagacaataccttatatacgaattggtgtagctataattcctgatgatttaattaatggctttagggaatggatgagatactcatattatttttcatattacatgccatcattggtgtctcaagcaacacttgaatcatatataaaaagctctatatataataagcatgtaactattctttctaacaatttaaaggacactttaaaattatttaggaaaataacttctacttgggactcaaatttagttaagatacttggcggaagttctggttattattctactataagattagctcctcatatcagctgtaataaattattagacaacttaaaaagcaaaaatatctttctagcccataattcagcatcatactataatacagagaattttgacaatagtctaagacttagtatcgctagaattaattctgctgatttgaaattagcattaaatattatttatgatgaaatattaaaattatcacaaatacaataataaaagatctaagggttatattctctcccttaaatcttttattatattaagcaaattgtggtaaataatctttatgtgcctctagtaattcatccaataatatttttgccattttctctgatggaattaatggattaatagttaatgcaagaagtgctttatgataatccccttcaactgctgcttcaaccactagacgttcaaatgattttattgtttgaaccaatccatttacacttactggtaatttccccatagcaataggtttaggtccatccttagttataatacatgaaatttcgactgctgagtcattctctattccttcaatagccccattatttttagtattaactggttgaatatctcccttgttgttataaatagagttaattaatctgcaagctgcatctgaataatatgctccacctcttttttctaattgcggtggcttaatatctaaattttcatctttgtatagttcaaataaatcattttctaatctcttaactacttctgctctagtttctcccttagaaaattcttttaattcttcttcaagcatatccgctgtttgaaagtaatacctatgatatggacacggcatcattctaagagctttaataaattctggattccactctaaatcttgaatattttttacaattgaccccagtttaccttctgctagtgagtctattactttatcagtaattttttcaccatctaaataaatttctctaccaaataccatatgattcaatcccatgaaatccatagtaattctgctatgatctacttcaagcatgtccgctactgctttttccattccaattggaacattacataatccaataacttttttattatttccatacctaagaagagcctctgttaccattcctgcaggatttgtaaaatttataagccatgcatttggacatagttctgacatatccttatctatatctaaaatcacaggtattgttcttaatgctttaaacatacctcctgcaccatttgtttcttgtcctattacgccatggcttaatggtattctttcatcctgaatcctagcatctaacagaccaactcttaattgtgtagttacaaagtctgcatccttcaatgcttctctcctgtctaaagtcaaatgaatttccataggtacaccagcttttttaaccattctcttagctaatttccctacaatatctaatttttcttttccgctttcaatatcaactagccataattcccttaccggaagttcattatacctttttataaacccttccactaattctggagtatagctcgatcccccgccaattgttactattttaattcctttttccatcagatatcctcctatatattataaaatataagcataatcatttttaaattttgatttaataatttaagcatttgtttatattggctatacttattttttattctttaagcaatttatttagatactcttataagaaatttcctcttctattctttatataaaaattatattttctcttattttcataaaattctaacagatctgttttctatatcgtaactcaatataatattctattcaataatataaaaacacaactgtactagtacagttgtgtttttattaaatatagagcaccgcaattgtaaaatactatttatcaatattctaacaatatctttacgaaaagccctaactactatttcctagtaattggcacctttaaatgttttgctttatatataacaataatttttagttatatatctttaaaatttattaattcaatgtttttttcattaataaactgtattacttctttattagttaatgtttctaattcctttactcttggatatgcatatgaactactactaagaatcttagaatcaagatatcctggatgacacataatttctaaagaatctacattcatattatcatccaaaaggtttattaacatctggggttcaatcatagaaagattatagaaactatcaataaactcagttgttgttttaatattttcatacttttcttctccaatcgccttaatatgtctaattggtatattatgctcctttgctaactcagcaactacctcaaaaacactctcaatagaatgtacatgatgatgtgtatctatatgtgttggaactatcccaaaagataaaaacttttcaaattggtttctaaattctattcttatatcttcaatacacgctgactcaaccatcttatcatattttaaaaaattcccttcattatcaactaaggttttcacgttctttgataaaggtctgcctgcggtaagaaccaggtgaattcctacacctaatttagaattttctttcgccaaattaactgcatgttccgttgtctccatattacacattaatgtggtagatgttactattccatttttgaatccttcaattatgcctaaattaattgcttttgaaataccaaaatcatctgcattcattattaatctcatatctttctctactccttatacttaatattttaatctaacagaaatatatttataataacataataatccacattatttttatcagcaatagctccaaataataatcatattatacatagctcttatttttagtcacgatatatttcgtgatataaacctgagacatagatcactacctatatatgcctaaactagtattacaatataatattcaaggattcagtaattattttactttttttctcttcattaatcatatcaagatattcctcaagcttttcatgccactccttatcactttcagttccataatccacatccataactgaatcatttggaatatacttaagtaacagtgatatttcaaaatcatctaagaccttaaatatctcaatgaattcataatcaaatatgcaatcagagccaagaacatctactaagtctctaagactatgaatttccttccttataatttgtatcttatcatccactttatcacaatctctaatttcttcagttatatccttaaatctgctgttctctaaactttctccatcttcatatctaattaaattttcatcttcatttttaaatgtgataaatgtattttccaatttattattttcaatattcttcttaatacttggcataatcttgtaaatagttttatttatataattaataaaatttatatcatttatattaaactcctggcaaacaccttcaactatcctagatattacttcattaaattcctcttctttcagttctcctaacttatttttaagataacgtctttcagtatctgttatatctagagttattcctctcttccctaataccatacatcctaaataattagtcagaaccaattcaaagatatttattaatatatgatctgaatttttatcaaagcttttaagcaaattttcaatttcatagctatcaaagtgggaacaaaattgattttcaaagtctattttttttaaatattcgcttatatattctattcctactaactccatctcatctatagctaatggataatctatagatccctgcatttcatgagccgcaaacctactatcatattctataaaaaataatggaatcccgtaatctatagtatctatatacgcataattacttgtttttaatttacttttttgcacgttctttaatagttctttactttcttctattttaatctttaaaactttttccccttcagaaaacaaatatttcattgcattttcttttattaacgtaatcttttcctttattgatgttttgccttttagaaagctacctatagtataataaattgataacattatttgctctgcaacttcaactcttaccgaatagctttcagcttttgtataataatttgcagtttctcttaaaatatctaatatttgaacttgaatattttctagttctttattatttaatatatcatttgaatgaagtacttgtagtaacgattgaaaataatgttccttacttaataaattttcaatggtatcatttctgtcaataatataattatccactatagctcttcatctccatccacatttaaataatcagaaaccccatatttaatattatgagctatagtatccaaatacttatatctaagtagctctaaagatccttggcattcattatcgaaatagcctttcattaaattaattaattcaatgtcacctatttcttccatagtttcatttttataataataaaatgtttctattagctcctctatagtttcaatataattgtattgagaaatatatggcgaatcgcaaaaggttgatattatttgttttattatacctccaccaaattcaactctgccattcttacttaaagcttcgcttcttatctcaactatctctttaacattttcttcactcagctttaatccatattcaactgtttcctcattacactgcaaaatctcttcaaaagtttgtttacttattatagaatcagaaatagacataagataatttttcataaataacaccatccaaacttttttatttttaagtattgacttctctttttaaatatgttatgattattatatatagataagccaaatatctttctaacaattaattctatcatcgactatatggaaagtcaatggtatttttttatgcccattttgtataaatagcaacttttataaattaatataaaatccccaataattaaaaagactgttaaatatcaaaatttattagatatttaacagtctttttaattattaggcccaaatttaataactttgattttttcaatagaataacaaaacactgaatcttcgccaaactaaacaaatgcctatctttatttatataaattaacttcttgtcaattttttgcattaataatctatatagataatacaattatataacccaatcaccgtttttaaatacttggattttttctccctcagcagtctcacctattatttcaagctcttccgaacctaccataaaatctacatgagttaatgaatcattagctccattttttattagttcttcttctgacatattgtcaccatctttcagacaagttggatacgcttttccaaaagcaaaatgacatgatgcattttcatcaaataatgtattaaagaaaattagtcccgaatttgatataggtgagttataaccaactagagcaacttcacctaaatatctagccccttcatctgtatatagtaatccttttaatatttcttctcctttttctgcagtaaagtcaactatcttaccatcttttaatgtcaacttaaagttatcaatcaaatttcctccatagttcagtggctttttactagttacatagccgtttactccatctctctttggaagggtgaatacctcttctgtcggtatattagcaacaaagttaataccatctttagaattctcttcaccacttaaccatagatgtccttctggaagttctacagttaggtctgtgccttctgatttataataaagatatttaaaattcttttcatttaaataatcttttctattttttaatttttctaaatgttcattccacgcttcaataggtgattccttatcagctcttactatactaaaaattgagtcccaaagattttctactgcatctgcttctgataaatcagggaatacttttcttgcccatccctttgtaggtattgaaacaacacaccattgaacttcattactcatcatggcagcgctaacatctttcatagctctatttgctgtttttgctaaagtggaaatcttattaggatctactccgcttaatagctctggatctctagcagaaatacttataaatgcagttttctcctttataagttgctctcttgataatacagcatgttttggctcccttttaaaactctccataggagccttattgtattttatcaaggcaagttcttcatcattgtaatcaactataacattaatagcaccagcttcataagcttcttctgctatcagtctagcaaactctgcacattctattggtgaatttataagcaattgttgcttatcttgtaaatttatgcctttcttaacaacgagctctgcatattttcttaatatatctgtattcattttgctttcctccacatttttccttaagttttattatcataattatagcatatcttactctataagtttttatttaaaacctgaataatatactttcatttacatctatttcgataaatgtaatataaaaatataacatttattaaaatagaaactcagatttcattagaaattatctgcttaaaaaaatatatgttatttataacgatcattcgtatttaaaaggcccaatctaataaaaatcgggccttgattactaagatgtaattacttttgattattaattttttcctatgctatttttatataaaatctttcataaattccttgatcttatctattttaatttcactttcaacaagtgattctccattttttaaaaagctaactttgtcatggaagttggatttctcttctttatataaaattcccaaaggaatcttatctccccattccattgatttttcaatagccttcaatttattgcttggatcgtattcttttccaagtttataaactcttttattataccattggaatgtattaactttattaaatgacacacatggctgtaaaatatcaacaagagcgtatcctttatgattaatagcttcaatcataactttcttcaaatgctccttatctccactaaatgctctagcaacaaaaccggcaccaagcgttattgcaagcgctactggattcataggaatgttatttgacccatttggctgaacatctgttacatgtccgatgtcagttgtaggtgatgcttgtccttttgttaacccatatatttggttatcgtgaacaaaatgtgttatatctacattacgcctaatattatgaataaagtgatttcctccttctccataagaatccccttctcctgtatttactattacagttaatcttttatttacaatctttgctgcaactgcaggtggtaacgatcttccatgaaggccacaaaatccattagtatttatatattgaggtgttttagcagcttgacctattccaccaacaataagcacttcgtgtggagccttacctaaatctataagtgcttgctttagagcatcaagaatattatgatccccacatcctggacaccaagctgtttctgatgttagaaatatttcattattcattattgctcacctccaattagcttactgtatatttcttgagatgaaataggtcttccatcatattttaagatactgctattacattcaatacctgtatattctctaataagtcctgctagttgtcctgtcgcattttgctctatgtttattatattttttactttttttgcatacttcctaagatttttctcaggtaaaggccagacatccccaaatactaatgagcaatatttatcattatttcctgaacgtccattaagaagttttatagcttccttaaccggactatataatgatccccatgctaaaattaaagtatctgcattttcttcaccgatgaattcaggttctaaaagttcttcttttaaatattccattttccttagtctcttatcattcattttatttcttacttcacctgattcagtaatatgtccatattcatcatgttcatcactatctaccaatactgttaatcctggtattttacctggcgttatacgtggcgaaacacctgtctttgttaattcataacgcttataatctttagcatttatatattcatcatcttttaaatacctttctactttaatcttattaaaattaaaaggctttacagttcttatactatcagctaaaaactgatctccaagtaaaataactggtatttgatacttatcagcaagattaaatgctcttatagtttgataaaatgcatcttctggttcccttaatgctattaccattttaggtatttcccctggtgatgaggctataacaaatttcaaatctgcttgttctgttcttgttggcaagcctgttgtaggcccaggcctttgtatctctgctattacaagaggcacctcaagcattccggataatcctaccgcctctaccattagtgcgaatcctcctccagacgatcctgtcattgctctaacacctgcatatgaggctccaatagccatatttattgaagcaatttcatcttcagcctgttcaactacaatttctgattcattcatctttgaagcaagataattcattatacttgtagatggtgtcattggataagcagaataaaacttacatcctgctgcaatagccccaagagcaatagcatcatttcctccaattaaaatactctcatcattgttcttaggttgaatttgatactttggtgcaactagcttgtatccttgttcaaatgcattgaaatttttgttggcgatttcctctttgaacttttctgttaatacttccttaacgccacttaaatccaaattaaataactttacaaaaacgcccaaagctatgctaccatatacttttggatttccaatgcttttagctaaagccttaagagtaaggccaaagaatcttttatcctcaagcttaatttgctcgtcagcaattataaacccatcttcctttaatctgccgatgtgaagatcaattgtttctctgtctaaagcgattattccatcgatatcatcccaatgggaatttatttgctcatttccaaatcgtatttgaaaaaaattatgcccgcctcttacccttgacatatagtcttgtatagtaaatatttcaaagccttttctttttaaaactttctctaatatagaggaaatggtctccattcctagcccagctgctcctccaattaaaatattataaatcataaaattcctcccctctaaaaacgcttataaattgcatgctgataatattttattattgtttctcagtattatgactatatataatctttaaacgcataaaacctacaattttttaatatatcaaaacatccttttaatcatatactaatattgatactaatttattgataagggcttattgttaaaagatacgcttgtttaggtgaatacatttatgaaatataattatataaattcttattatttaatccaattgcagaaaattgttaagttatatgaatctattgatttatgggtatataaaaattatatgccacactattctatatctttctaactccatcaaataatattatgttaatttatgctactcgatcaatgaaaaataaaactatatatttaactttaattatagaagcattggcaagcctgggatgtaaaaaagaattttcaaacttttttataatcaaaaaacctgagttctataagaagtgtttaaggagtagataattaattattaataaatattgtatatattttattaatagtcataagcataactatccaagaagtatcatatacgattcatttaacaatgagaattcctactatgaaaataattaatcaataactggtagtagcgaaaagcttatagacaaatataaaggtaagcaaggaatagtagttgttctaatcgctgtatactactatttagttgtggatatagaggatgattgcattataatgtaagcaatcagctcaaaagataagaaattaggtgcatttattgtaggtagtaaaacaaatttctaacgaataaattgagatatggtggaaaattacaaatccgtttatgggatagtctaataaactttatgaagattatgcaatgcattattaagccaagtaaatacagactatctctttatataaaaagtagtaaatagataagcatatctctttactttatattcactcctattcctaaagcaagcttgaaatcaattccttacttggtgatggtattgtaactgtacttataatttcaccagtttcaataagtctgctttcgcaagcttcgactgcagattttacagcggacacttctccagtcattaacatgtatccttttccgcaaagtccttttgcaattcttatttctaaaagttctatattagcagctttcaatgctacatctcccgcaattacagatgctactgccgatatagtttcaacaattcctagcgaatcaattgttccaatatcaattgttcctgtaatagccgggaatacattttcatgaacatttgctattaaataatcacttataagataactgtctccaatacttttccctactttaacagcattttcaactgcacctacatctccagataatattactatatatttcccaggacatactggtgaagctaaaactaattcgacatttgaagatttaagcatttcatcacatgcttccattccttttgcaatacttttatattcaagtaatccaatagaccttctcattgctgtctcttcccctttcatagatttaataattcatatattatttaactataactatactttcatctgttatttcttttataattccatctatgcttgcatggatcttagctcctagcttcccatctgaaatttctcctatcaaatcacctttttgaactttatctccaattttaactataggttcagcttttgcccctatatgttgtgatcgtaatattgtaactttttgaaaatcgtattctttctcttctaaaagtgaatctgaattatatttatttatgtcaagcctttgctttaatctctcaacaggaaattttctataccttctaaattcatcagccttttcgggtatcctattatgaggatttcttataccgtttttgcttaattcccctttaaagaatctatttaacttccaaggttgtaatcccataatacacacttgttcacaaatagcacattcgctacaaagaaaagtatttgtaggtgagatttctgtactacaagtcttaccataactagcaattctcattattttagatggttcaattttgtgtcctagcaaatgtctcggacatacttccgtacataaggaacactgacaacacgctattcttgcatctcttatggtagcttgtatactctttattttagattgtactattttatgctcctttttaagcactattagcccctttgtattttttttgattggactttgaatatcctctactatttttcccatcattggtccaccatctataacgcaaaaatcacttatagagctgccgcctgcaatttcaattgcttcttcaatagaaattcctataggtactttaactgttattggattcttaacctcgccagtgatggttaaatatttttcagtgacaggaataccattaattgcattatacacattcaatagtgtctctacattaattactatgacttctacatttagaggtattccaccctctggcacaatcttatttgtaacttcatatacaagaatttgctcatctccagcaggataaaaattttccaacataaacagttgtaatttaggataatctttgatttttgaatttaaggtatttattgcgcttttatatttcccttttagcgcaattatccctacctcactttcggtctcatcaacaactttgtttaatgcgtaaagaatttcatctgctttcttatccatcaattgttggtctacctttagcaatggttcacattctgcaccattcactattacggttttaacttttgcatttaatttcacatgtgttggaaaaccagctccaccggctccaattattccagcatcttttattaaatcaataaagcttttttccataacttctctactccaattctatttcattgaaaaagtaccgcctgaacacatcttctctttattgcaaattttttctttaagatatatgagagaaaatattaattccataatatgataaatatttcccattaaacaatgaagtatgttttctaatagtaatctactaggtaaacatagtgacaaagtataaagggaaatatactatcatactgactacattatcttatattaaatgcatctaccataacgcacctacgttttctgcagaaagaccttgctgttgttaaaccttcaccagtagggcctgcaatagtaaatgttgtagttccttccccaccaacacctattccagcataagatggtgcatttttgacaaaaatagttgtttctaaaagtcttgccattttagtgagcttgtcaacattctttgaatgcattatagctgtatgtctatttccatgctcagcaacgtaagcacattcaatagcctcatctacatcttttgttcttacaataggtagaataggcatcatcatttcttccaaaacgaaatgatgatttttctctacttccattataattactttaatattctcatctactgaaataccaagcttatttaagatatatggtgcactctttcctacaaaagaaaccttaggtccgccattttcatttgtaactaaatctaaaagtttttgaatcaagtctctatctttaatttcataagctccattcagtttcatgtaatgtattaaataatcacatatttgatcaaccgcaaagacttctttttcagctatacaagggacattattatcaaaactgcatccattaacaatatcaatagcagctttttctatatcagcagtttcatcaacaacaacaggaggatttcctgcccccgctccaatagcttttttccccgtagacataaccttattaactatggctggtccaccagttgctacgagcattcggatttttggatgctccatcataatatttgtattttcaatagaaggttccttaactgttgctataagattatcaggagcccctgcctcttctaatgctttatttaacatagttactaattttattgaaacattttttgctcttgggtgtggactaaacactactgtattcccgcccgcaatcatagaaatagaattacaaataatagtttcagtaggatttgtagtaggagtaatagcaccaattactccaaatggacaatattcaaccaaagtaagtccattatctcctgtcatagcctctgtagttaaatcttctattcccggtgttttttcagctgctactctatttttaattaacttatgttcatatttaccgatttctgtttcttcaacagacattcttgaaatcaattctaaattttctttcttcaagatagtagcttttatagtatccacatatttttgtttgtccgtcatagaagcatttaataattgtttttgtgctacaaatgatgcttcaactgccgcatccatagttccaaaaataccgtaattttttacagactcaaatttatccaaatttaataagtttttatttttcacttcctctattgcttgcctaacaagtttttcaactaaaactacatctacatccatttatatacacctctttttaaaattttcatcctctattacagttcattgcaatgcctaaaggcgttactaataaaggttcattaaactttatggttttaatacctatttctttttcaaaaacatcattaaattcctcaaaggaagaagctcctccaacaacataaatttctgaaacatcataaccatttaaatatcgttttactattgacgccatcttttgaactacaggtttaataattggaaatatatctttgtctttcttaggatctttctttaattcttctgcttccttaattgatattccataatatcctgcaagtacaagtgtcatatgtgtacccccagttgcttcatcagcagtaaaaatcacttgtccatccttcaatatactaattcctgttgttccacctccaatatcaacaactgcaccgtccttaatgtttatcaccctagctgccgctgttggctcatccacaacatttataacttcaaatcctgctgcttctacaacattggatatacactttacattaccggaaataattcctggtggtacagcagttgctgctgttagaagctccctaccaattatttcttcaacctcagcttttaaacttttaactatatttatagcacctacaaaatctactacaattccatctttaacaacagtagaagggtaagtagctcctgcaataggattattattagaatctacaactgatacaacaatattggccgttcctaggtctactcccgttttaagctctccttcaaatgaattacttctattttcagcaatcaaattggagaattctgttaatatgtcactatttattaacattcttatctctcctatcataattaatttgtaactaactgcttacttcctatgcaggataacaaagtcatcattttttaaagcacaagcattagcttcatcaacatccacatgcatttcaagagaagacttatcagaaacccttattaaaacattgcctaagataccatgtctttcgcccatagtttccacttcaacaatttccttatctttcactcccattttctcagcatattcaggtgtcatatgaatatgtcttaaagcaatgattgttccgtttggaattttcacactccctttaggtcctataatttcaagtcctggagtattttctagttgtcctgattctttaattggaggttttacccccaacctaaaactatctgtcattgaaacttcaacctggctttcacttcttataggccctaaaatacggacattttcaaattcacctttaggacctctaatagttacagtttcattagctgcaaattgtcctggttgtttcaaatcaatttttttagttaagctatatcctagaccatatagaatatctaaatccttttgacttaggtgcacatgcctatttgatacgccaataggaattttataattctctaatgctttgattttatctacaactattttagtaattaactttactacatcttcgctatgcattttatcaactcactctctagatatcctataaaaactctataaagtttttggtaatatcttttctgtatcaatatgtggtcttggaataacatgttgcgaaatcacttcgccaacatttcttgcagctgcaactccagcatctacagccgcttttactgctccaacatccccgcgaaccattacagttacaagccctgatccaattttttcatatccaacaagcataacattcgctgcctttgtcattgcatcagctgcttctattgcactaactaagccttttgtttcaaccattcctaaagcttcattattcataataaattcctccttattttttaacatataaatctaaatgaacatcgcattaataataaacattgaaataaatattactgtagctggtgggtctatataagtatcacaataactgttaataacttttcctgcaattaaccaagctattgcacaggcaattcctacgcaaacacctataaatatatttcctgtcataactgtagccgctgcagctggtaaagtgatatgatgtgttaccggaactccaaaaccagtctgcaagaaaatcaatgaagttgcactaattccaaagcaaacgataggatacatagacataactttaggcgatacacccgaattaaccattgatatagcaataccgcttacaacaattccaactgttaatccaagcacaatatgattaactaatgtttttgtatcaggaagccaatctcttttgcctgccccagtatacttaccaaccggacctgtcttgccaaatactaatctcgaaatcatcaaaacggtgaaaacagaaatagcaggaaggtctgttttaaagttcaatactgcaccataaacatagtgacataagaaacctataactccgaataggcctccaacgagtattactgtataatcattaattgaatataatggtgttaatacatcgtttgcattgctcaatgtttttcttttattcccagcaaatgctgctgccgctactcctgctgcaaatgcaatatgaggacctaaaaaagaaccaaaagtaatatttccaaccgttggttcagcaatacctgctaatcctaaaattcctccaacaactgctaaaattcccgttaaaataaaagcaggtattgatccaagaagtgctcctaaagctcctccaccaaatgctgctattaatgcatagatattcataacatcaaactccttaaatactatttaaaattttccaaaacacattgcattgccttctttcttaaaagttccattttatcagttttttcccatttaaaatttttattttcacgcccaaaatgaccataggcggctgtattaaaaaattgtggtttctttaaatcaagttgctctaagatgttagcaaccgaaaaagaaaaagtctctttaattatttttcttatatctttaatatctattttctcagttccaaatgtattaatagttattgcttctggttcagcttctccaattacatagcttaaggataattcaaccttgtcagccagctttgcagcaactatattttttgccacataccttgccatatatgctgctgatctatctacttttgtgggatcttttcctgaaaaggctccaccaccatgtcttccaattccaccataagtatctaccataatttttcgtcccgttaaaccagtatcgcctgcaggaccacctataacaaatcttccggtaggattaatatgtatcttcgtatcatatttaatccacttgctatcaataacattacgaataacctcatattcaataacatttttcatataatcatagtcaatatccggatcatgttgaattgaaattactatgcttgaaatgttaattggattcccattactatcatatttcattgtaacctgagatttaccatcaggacgaatccaaggaattccttcactttttctaagtttagataacctcattgtaagtttattagctagatcacacgttaatggcatataattatcagtctcattaaaggcatacccgtacataattccttgatcaccagctcctaatattgctttagtaatcttcctgttttcttctattttgtcaacacctaaagcaatatctggagactgtttattgatatttgtaaacactaggcaggtcttataatcaaaaccatattcttctttcgtataaccaatattttttacaacctctcttgcaacctcaacaatatttacctttgcatttgaagtaacctctcctgctatcataattgtattctttgagaccattgtttctactgcaactcttgaattattatcctgtgctaaatacgcatctaagattccatccgatatctgatcgcaaattttatcaggatgtccttctgttacagattctgatgtaacaaaatattcgctcatattttaccacctaccttgattttctgattctacaacatttttttatatttataaaccgttgtattttcatacttcttaaacactttgctaaaataactgctctcattatatccaagtttaaatgcaacatccgtaatacttaaatcagtaaaacaaaaataacttttcgccatattaatctttctcatatgcaaatattccataacacttatgttaaactgccttttaaaaattctacttaaataaccttggcttactgaacaattattaattatctcatttaatccaatctcttcttcaatattattttcaatataactaaacacatcatttaatattgaatacttttttatgctattttgttgaaaaacataattcataaccttgaataaccaaaattctaaaaatcttttctcattgcctaaatcttcttccatcggaaatagctcattaagctttttgggctttttgtttagcagttggacagaattaataagattttctcctatttgcataaattcttctcttaataactttgtatcagactttttagaagaacacatctcatctattatcttaggaatttcataatacatttttttgtaatttttttctttaattattaaaagtagactgtcatacttattcccttctatctcacttttaacattctgattctcatctttataattgctcaataatttttctatttgagaaaaggatacaggttttgatatatactctttaactttagtttttaaagcttcaattgcaaaatcaaaactgttataagatgatacaataaaaatagtggtacttggattaatgatgtatatctttttactagattctatccctgattcaccaggcatcatgatatccataaaaacaatatctattttattatttttacatatctcaactgcctgctcaccgctagcaacagaatataagacctcaaatccttcaactttagatatcataacctttaaagatgctctcattagtggttcatcatccgcaattaatactccatacatatctagacattcctttcttcgaattttattggaaatcttataatactccttgtaccttctccttcagtattttcaataaaagtatcatacttttcaccaaataatgttatgagcttttctcttgcattggagatgcttatctgaatagattctccctcataaccacctttatatatcttgaatttcttagctattgcctcatcactaaatccagatccattgtcagaaatacatataacaacatccttaccttcataataagaagttaccgctacttttccaccgttattctttgttgcaattccataaaaaacagcatattccacaaatggcataataatatggcttgggattctttgataatgcattttttcattcatgttaattgaatattgaagcaaatctccatacttaactttctggatcttcaaatatttttcaatattttcgaattcatctgataaatttgtatagctcttttgactacctaaactctgctttaaataatctgcaaacattacaatcatctcatttgtcttaggtgaatcttcaatagctgctaaattagaaatcgaattcaaaacattgattaaaaaatgtgggtttaattgagctctgagatttataagttcattttttttcaatgcattttctatttcaagttcttttctagaattatttaattcctcaacttccttttttaatgagtttttttgcattaatctatatgcttctttctctcccaattgatttataataagagaaattaattccgcaacactcataaatttttcataatcatataattgaacagactcaaacaaacttaacatatgtttatcttccctataattttgagaatgttttattacattttcaagtttacttactcctgaaggtgcatctaagcatctcacttgtccgccaataaagccacctaggtaatggcctctaacgattataggtattgcaatttcaagtaatccacaagggcaaaaatatacacaattcttttgtgtaactgctgcctgaattccaccaaaagcatcggaagacttacagacacattctgctttcttattttttctaatctcgctacaaaattctgtgaaagaagtcattttggtaattggttcacctttataatcaacagtaacaaatgcaaggcctgttgctctagatatcttttcctggatatcttctaatgtttctttgccgaataaattgattatattaaatttattaattaaattctcatcaatctgcgtattgctgtcaacgatttcaccttttgttctatcatggaattcatgcatttaacccactccttcatacatcacaagaatatatttttctaaatatattctatcatactaagattaggttagtacactaattgaatcagtctttccataccaaattttgtaatttctcttctatttgcttgtgtacatccatcctttagtgcattttcagctataattgattttacattgtcaaattcatttttatctacaccacactcttttaagttttgaggcatgttcataatcttcgtcagtgttttaatatatgtttttaaaacttcaactgcgaattcatcactttgtgctttttccaccataccagttttataaactaatttagcgtatttctttaaaatctcatgatcttcacagttataatctattacaatattcaccaagattgaattggcaagtccgtgtggaatatgaaatctacctcctaattgatgagcaatgctatgatttataccaagacccgctatattaaaagccatacctgccaaattagatgcttcatgcatttttttccttgctgcgatgtcattaccttgtttatagcactgtactaaagattcaatgaccaattcaacagctttttcagctaatgcatctgaatatacatttgcatcttttgcaacatatgcttctattgcgtgagttaaaacgtctattcctgtatttgcagtaatgtctgctggaacagaaactgttagattggcatctaagattgcttcatctggtagcatcacatcatcaaaaataatatgctttgtttttgtctcagtatcagtaactactgtcgctgacgttacctcagatccagttccacttgtagttggaattgctataaaattaactttatcaataaagctttgctgttttgcgaaataaataattccctttgctgtatctatagcagagcctccaccatacgcaataactatgctaggattatttttcttaataagagcaacaccttttccaattacatttagtggcgggtctggaataacctcatcaaaaacagaaacattattactgtcattaataaaactcaatagaccttttacgctgccgtttttcacaagaaattgatcacataccacacagatgtctgtatttttaaatttctctaggcgcttcagagaattttctcctgaatatatttttgttttaatatacacacttttcaaaacttcctctcctttcctacctaattgaaaaaccatttgttagggaacatcgccttcttcttgcaaaatgccttgctgtagtagtgccttctcctgtgattgtagcaattgtaaagctggtatcaccttcaccattacatccaattcctacgagtgaagcaccatttttaacaaatactgccgtctgcattacttttgctgctacatttaatctttcaattgattgagaatgaattgttgctgtgtgcctgaatccttgttctatttcaagtgctgtatccaaagctatttcaaaattctttactcttattaatggtacaagtggcataagcatttcaactgttgcaaatggatgctgctttatagtattaactacaataagcttaatatctctttcgcatacaattcctgcagcctttaaaatctcatttgcacttttaccttcaagagtcttatttaaggtcatgtcgcttgttaatgtagctactgtgagtttaagcatttcctcatcattatctacgtaatataccttatttctaacaagctcttctactaataaatcagcaatacttgaaacagccactatgcttttttctgaaatgcacattatattattatcaaaagaagctccccttacaatatctcttgcagcctttttaatgtcaccagtttcatcaacaatagtcgtaggattaccaggtccagctccaataacttttttgccagatgccattgcttgccgcaatacattattaccacctgtcgtaaccaccattgaaatatctggatgagtcataatttcattagtacaagtaattgaattttcatttaaggttacaactaaattatctattccacatctttctcttattgcaatactgattatctccgtaacatattttgacacttttattgctcttggatgtgggcaatgaacaactccatttcctgctgccagcatccctattgtattactaattaatgtggcacatggattagtacatggatgtatagcgcagataacaccataagatgatagttcatataatgtcatcccattatctcctgttctcacttcagtaattaagtcttctattcctggtgtttttttaatcgctagaataagtttctcaattttgtcatgcacattccccattccagtctcttcaactgtcatataagctatttcctcaaccctagataaaagcttttccttaatagaattaataatctcttgtctttcattcaaagtaaatttgctatattgattatatgcacctaccgctgctaaaactgcatcgttcactgaagaaaaaacaccactttttaattcttcgttattaaaaaatttataatttatatccatgttaacctcctctcttgattatggaataaatgcatttttagacatcaattgtatctatgattccaataatagccatatcaatagcaaccttttgtttctctacacgtacagctgaccctttacaaagtaatacataatcccctatacctgctccgacataatctgctgcaacttcttcgttgccaataaaattctcttttacatctattctctttacaatcattaacttatatccaactaatgaatcatcttttcttgtagctacaacattaccaacaacttttgccatatacatactaatcacagtcctttcctttaacagcttaaaaagtgctatttattattttcctttttttctactgctagtttttctagttctcttttcttctgactgagattgagaaatttctatatcagattgcttaagttgaataccatcttcttcagattgattgatgtcttcattattttcaactactgtctcttcactttgagaagtatttccttcctgtttatcttccagcttttcaacttcctcagttaaagcctcttctaatacaactacgtgattttctaaatcttctttgttttcaacaatgttattttcctcaataatgttattttcttcacttacattactttcttcagttatattattctctgtgatagaagaagtatcttcttcctttttaggctgacaaaaagcgctttctatattattagaaggtcttggaattactttagatgaaacaaatgcgttgttttcaatagcaacttgtcttcctgctgtaactgcagctgttaccgctccaacatctcctgaaacttttatcgtcatgtacccggatcccttagtattttcaaggtcaattatattaacattagccgttttcgccatagcatctgcagctaaaatagcagttgataaacctattgtttcaactaaacctaatgcttctttcatcttgtcacctcactttaatctttattaatgtgtgcatctttttacaattttcataaaatacgagtaatctcgcattctatgaaaatctttattatactaaacgatacctttgaatatactctaacttcttctaataatttgaatgtttaaattttttgccttatccttagctaactcagttattatatctcctgaatataagaataattttttatcattcttatatctctctatttcctgaacagtaattattcttttgccatctttattatttaaaacctcattatattctgtactttcatagaccacggaactattttcactaaatttattttcatattcttcaatttgaaaaatatcctttgttatttcaatattaaattccaacaaagtcttgtaataatttaatatcttattaatataactaggtggctctttgccagtaaatttttcaagtcctgaactgagtaaaataattctttgtcccttttccatacttttaaaaatccatctactttcaaaaatatcatcaatacataatgctgttttaactacgatttctctaggaactactggaaataccgtgagatattctgatgattcatcaaagtcagcattctttctacttattacggatttacatacactaaattttttcaaattacttaggtgaaaatcattatatattccatctggtaatactgcataaacttcatattcgtttcgcttatctaattcttcaaatagagatgaatacttgttattccactcttcagtaaatatcacatacagtttctttcggggaataaacaaattctgtatagagctttcggcttgaagcaattgtatggctttaatcactaattctcttagtcttttctcatctatttccacgttatccctcctaagctctaaaagcaattactgtaatattttctttttgcataactatctcattataatttaaaatcttgttatacgaatttaggaagaatcttttcagtgtccatatgaggacgtggaataacatgaatagaaacaacttctccaactaatctagcagatgcagcccctgcatcagttgctgcttttacagcgccaacgtcaccacgaaccataactgttactagacctgagcctatcttttcatatcctattaaattaacatttgccgctttaaccatagcatctgctgcttctattgcagcaactaaccctttagtttcaaccattcctaatgcatctgaattcatattaaatacctccttaaattttaggtaaacttttgtttttttatatttaactttatatagaaaatattgaatttaatatattatattgataaggaaacttgactcacatgcgttcgctgagtaagtgattcacaccaaatcacagatttgggttctctacttatatataaggtgttgtagttgatttaggttcatcacctaacgcacctagtaattttttacctacttcaattgatgctcttacagcttgtcttacagctcccgaatcaccactgaaagttaatataacctcatttgagaaacttgttccgtttcctggtgaacagtaacccacaacatcaacattagcagcttttacagcaacatcagctaaaactgttccaattgcagctggtcctgcacaaaccattccaaaagctctgcctagtggtgttccaaaagctttttctaaacaataacttgctctagctgtgtattgaaattctaaatgtcctgcatcatttgcatacacatctccaaaatatttatctagacttgaaagtgcaatttcaactgcacgtctagcatctgaaacatcatcagctcctatataaattaaacttccatgacctgctccgcctttagtatctctaggtaattcaacagaaataacttctgtatttgtagctttaacagcatcatcaacagccataatttgaggtccagctccggttcttccacctatgataccgattgaacggtactttcctaatttcatagtttctgtaagtagtggatctacacttgcaattactagtccaatagtatcgcctattgcagtacctacaaattcagtaacacctattcctccactagtatttttgcttatattttgagaatcattattttgatttttaacagatattccaagttcgctagaaacctgtttcattaccttttcaatcaattgttgatccattttgactcctccattctaaaattatatctttaaccaccaataatacatttaatcccctgatcctcaataatcttttttaagacttcaatctcatcttcttttaatgaccgtgagtctttcataagataatttcttccaaggagttcatatttattttcaccataagtatggtatggtaacaaatgaatcgtatcaatgttattcaacgttttagtaaacctacataattccaaaatatcttgcattgaagaattaaagtctggtattaatggtactctaattaccatttttgatatttcagaaattctctttgcattatttagaattatttcgttagaaactcctgtgtattttctgtgtaattcaagatttgtgctcttaatatccataagcactaaatctatataaggaaatacttcttcaatagtttctgaatttgcataacctgtagtttcaatagctgtatgccaaccttgtgctttacatgccttaaaaagttcttttgaaaaatctgactgcactagtggttctcctcctgataaagtgattccaccaccagatcgtctataatttatagcatcttttttgagttcttttataacttgttcaatcgtcatttttttaccttttaagactaaagagcttgttggacaaacattgctacattcaccacatgctgtgcaaatttctctatttataaaacctttattattaacactaattgcacctattttgcaggctgaaatacatcttccacaatgaatacaattcgcagattgatacattatgacaggtttaattttctgtgattcaggattgctacaccataagcatgataaaggacatccttttaaaaaaactattgtacgaattcctgggccatcatgtatagagaatctctgtatatcaaatactgttccttccatactataattaattgtatccatcatgcacatctcccctaaccttataaagtgtaactttttcaaataaaacttataagggataaaattttggcctacttattatgttcaaataagcttaaagtgaatgttcagtacgatttataatgtcatcttgtacttcctttgctaatacagtaaattgagcactatagcctgcaacacgaacaaccaggtctttataattttctgggtgcttttgagcatctaataataattgcttatcaattacattaaattgaacatgcatacctttatgatcaaagtaacttcttattacagaagcaaagttttgtaatcctgtatctccagcaactgcagatggtaagaatttttgattataaagtgtaccatttgatgctacaaagtgatctaacttagcaacagaatttgctgctgcagttggacctgcacaatctttacctgctctaggagatacaccatcagcaagaggagtcttagctaatctaccatctggtaatgccgcaacatctttaccaaataatacatttgcagatactgggtaaactccagcttggaattgtcctccacgtgggttagtatatttttcaacttcgaagcagtatatttgtgcacatttacgagcaaccatatcaacttcatctatatcattaccaaagcaaggagtactttcaagaagtcttcttatattatcaaaatctcccgaaactgttgttttaggtgaagtaaattctgaagagattctactttgaatttcagatatatcaattgatccagaattacttaatattctcttaactgcttcatatatctgcatttcagtaacatcggcattgttattgcttgtactaactgtattaacgccagtatgtccaaagtttgcatctaatgctgcttttaattgatccatttcaatagttttatcttcaaatacatgtttttgaattgcatatacggaatctcctgtatctgctataccaaaagcttgtggtcctgtaaagttataaattgctccaccttcttgaacagatttgcctcttccaatacagtcatcaaccattgctgataagaatggtaatggtgctctttcagcatgagcataatcaacacagttatctgcttcaacaagatagtaaacaaagtattccatttgcttcttaaatgctgcatagaaatcatcgatactcttaaatgttgttatatctcctgtgataggacctaattgcttgttgcctactttaccattatttaatgtaatttctaataccttagctacattaaagaatgctgcatcatgccagccttctgtcttgtttggacattgaggttcaacacagccgataatacaatagttacgtgcatctctaagagtaacacctctattaactaatgctggaattataacttcatcattgtacatagcaggtacgccaagccctaatcttgcaacttcgcaagctcttaacaagaattcatctggagttccttgccatacacggatagagaatgaaggcgctggtaatttaacatgagctgttgcatccatacacatgtaagatatttcatttgtagcatcaagcccttcttcattttgtccaccaacacataggttttggaatacagcataacctgcaaaagcttgagctgaaatttcatcacgagttttattgatatcattaagtttaatccaaatacaatcaactaactcttgagcaaattcttttgaaatatttttatcttctttaaggtaaggatacatatattggtcaaaacgtcctggcgaaattgagtgtccattagattcaatttgaaccattatttgaataaaccagaatgattgacaagcttcatagaagtttgttgcaccattttcaggtactctttcacagttagcagctatttgtaacaattctgcttttctagttggatttaattctgcagctgccatatctctagctttttgagcatatctatgtgcaaaatttattgctgcgctataagaaattactacagcattataaaattgttgtttctttatataatcagggtctttcttgtccattttactcattgcttcaataacttcagcaataatgcctttaaacccttttcttaaaatctttccataatcaacacaaatgtgtccgacaccaccatagaaataatttcctacagtaaatactccatttgccatacagtcttttgcttcttgagacatataagagtcagcaagtgcacttgtagttttaccgtcccaatatttaaatgcttcacttaattccgctgctgtttctttcggaatttggaatggatctgcaactcttgctcccattgtgtcaaattctttagctacccaatcataagaaaattctggacagatttcagtagaacgtggatttttagtaattgcaccaactactaattcatcttcacgaatagtaataggtagattattaaatattttttctacggctttagcacgtcttaatataggagatagaccttctgtttccttatatgattctgttacaagaaccgctctttctgattctacatacggaattgcatccacaatcattctttttaatctttcaaccctctcagttggttttgaaaaccctttagatatcatttataattccctcctcaaaaaaatcgtaaaaatttatttcgtgcaagttcattatatattagaggtatgaaatcgttgtaatacaattcaaactaaaatattgtaaaattaaaactataattgaatcttcacattgagagcatttaaaaaatctttcaagatggctgtatttcctggccagactggtgcagttattaagttaccatctaccactgtttcatctggatttttgtctataaatattcctccagccataactacttctggcttaacagcaggatacgcagttaactttcttcctttaattatatcagccgctgttaatatttgaattccatgacatatagcagctactggtttttttaattccataaagtattttacaatatcaataacccgtgtattaagtctaaggtattctggtgctcttccccctgttatatataatccatcatattcttctaattttaaataatcaaaagacatatttaatagaaagttatgtccaagcttttcagtataagtttgatgtccttcaaaatcatgtattgaagtctttatatattccccggcattcttttccggacaaactacattaactttaaaacctaacatttccaaggcttgatatggtaccatgacttcataatcttcagtaaaatcgccagctaacatcaaaatttttctcatattcaaatctctccttaaataaaatttgcactttttaaacctttacatgtaattttaagaccttttctatatgctacttttcccaaggcagtatatcgtcatcttcttttaaataatccaaaagatttggtattccttctcctgtatatgaacttatatgaaatatttttttacaaccggcaaggctgagccatgcttctgctaaatctgctcttgcattcttattatctatctgagtcacaattccaactacttctctagtcgctcctgctgcaatattagggctataaagagaatattcttcaagtgaactcattagaagtccaattacatcggcttcataggagtatagtattaacgctcgtgctagttttttattttcagcatattcgccaggagtatctataataacatcaaaattatttatatattgggttttatgatatgtaatctcttttccttttaaagcttgagttaaagtagttttaccacagcctgtccttccaactaacataatctttctcataaaaccacctatgcctttgttagattacaaacattaaaccctagtgtattttttgcatagtttaagatagactctaaagcaattgccacatctgaaattgttcctgtaataatcaaagttccactaaatctatcaataaaaccaatctctattgccgacgcttttattgctatatctgcagctattatagaagtttcacttggagtaacagtgagaataccaatagctgccctgttataatcaattttagggtctaatcctagcttcttataaataattgagtctgggctcgcaattacatgagccattgtaatttgttttcctggaacggtttcttgaattatcctcattaaatcagttttatttatctgcaaatcatttaacttcatttttttcaccctctcgaagaaattgtaattttaaacacattttttttgataccactctgtttataatgttagcatatccctaaggactattagtaataattttgtaactaaaaataagtaaatttaagtatagtctgaactttacttattatacaattgtaaattacctgtagcaaaattagttaaattatataatattattggagtaatttaacttaaatacattatataaataatatttataggagcgattatatgataaatgaagaattaataaaaaagttatcgagtgatctaattagttctataaagacgcctaagctaacactaaaaatggcaaaagaaattcttgaaaaagcagaaagaaaagctgagtcaataaatgttccagtagttatagcattagttgatgatggtggaaatcttatcgcccagcatagaatggataattcaatcttaataagtattaaagtttcctttaataaagcatatactgcacttgctttaaagatgtctactgaaagatttaatgaactagcgcttcctggcaaacctctttatggcttagaaaatactggacatggcgaactttgtattttaggtggaggaataccaatagttagtaacggaaatatcattggtgctattggtgttagtggtggaagcattgatgaagatattcagatagctcaagccgcacttaaataatttaataaaatgtggtataatttctatatagggaaggagtgagattatatggataagtttgtaattgcaataacaagaacttgtggaagcggtgggacaacaatagggaaaatgttatctaaagatttgggtataaatatgtatgaccgtgagttattacgtttggcttcagatgacagtggtataaatgaagctctatttgccaatgcagacgaaggtgtaaaaaatagtttgttatataaggtttcaaagaaagtatatgatggtgaattaatcccacctgaaagtaatgattttacttcaaatgacaatttgttcaattatcaagctaaggtattacgtgaattagccgataaagaatcttatgttgtgatagggcgttgtgctgattatatcttaaaggataaaccaaatatatttaaaatttttattcatgcatcagaagattactgtattaagcatgaaatggatatccttggcgcttctgaaaaagaagcaattaaggaaattaagaaattaaataaatatagaagtgactactactattaccacactggcaataaatgggaggacgtaaaaaactatgatctgtctctagataccagcaagctcggcttcgagaaatgcgtaaaatatattaagaagtatgtaaagttacgtatggaattataaatcttcggacgtccttaaaaatatcttcaatataaaattaaaattgccaactaaataataagacaaagcaatattattattttcaacaaatagtatagaatactaatagcatggtaattaatttataaaagccccatggtgaattttcttacaccatgaggctcttcttatttattattacattagcgcgaataatcctacaaatgctaaggcaataaaatacattggtacaggaatatcttttgatttacctgtgaataattttattaacacatacgaaacaaatccaaatgctaacccatctgtaattgaatatgttaaaagagttaatatcaatgtcaagaatacaggcattccttcagtgaaatctgagaaattaacctttgctattggttccatcattactgcacctaaaactattagaactggcgctgtagcaaaacctggtatagcagttaaaattggtgaaaagaataatgacaagaagaataatccagctattgtaagaccagcaagtcctgttcttccaccttcagcaataccggctgctgactcaacaaatgcaactggtgtagatgttcctaaacatgcacctactacagacccaatagcatcagctgttaaaactttatctgcatttttaacattacctttttcgtctaagtatccagcttttgaagctaaaccaattagagttcctatactatcgaaaacatctataaataacatagaaagaattgctggtattataccaatcaccattgcactcttaaaatcaaattgcataaatattggagcaactgatggtggcatagatattattcctgtaggtaccttagcaactccaaaaatcattcctaatacatatacagaaaacattccaataatgaatgaaccttttatatttttataatataataccgatattataataacacctagaccagctaaaagaactgttggatcttttaaatttcctattccaactaatgtagcttgattagcaacaatcatcttagcatcttgaagacctataaatgttataaagaaaccaataccaatactaattgcatattttaatgttggcggaacactatcaataattacttgtctaattttaaatatgttaagcgccataaatataaatccttcgattaatgaagctgccaaagctgtttgccaagagaacttcattcctaaacaaattgtgaatgtgaaaagagcatttaatcccatacctggtgccataccaaatggataattagcaataagcgccataattacagtaccaataaaagaagccaatgcagttgcagtaaatacagctgatacatccatacctgattgacttaagatactaggatttactactaagatatacgccatagttaaaaaggttgttaaccccgctaacatttctgtcttaacagttgttttattttttgataagtgaaatattttttctaacataccgttctcctccgttgtttttaccgatttttttaatacattgtccaatatagattcctcctatttttgagctacacaaattaacactgctactccaaaataatacatctgttagtaggatgcactaacgttgaaaaaaatataaaagataataacaagaatttaaagatttcttgtaaaatataagcccctttgtttttttacaaaggggcttacaagtaacaagtacctataaacacccatagtcagacaatttacggtagtccggtagaaacgcttgaaccttattttcaagcatatacgggtaaaatttcattatttatatatgacatactaataaattactttttgaatttccatacaatcatcgaatgttaaagcatagaataaataaaatgtaatatattcagtgcgtaatatatagctctttattttacatacttaatgctacaatactttgaactataaatcaatagtaaattaaatattttatgtattttttttatttttatttatctaatgttcgtgtttttatatattttgggcaaaaaaaatctaataatatagctataattcctcgtatgtaaaattattccgaatattagtttttaagcaatcttaatatttatatttattattctattaactttttatattatcctgtttactattaatcccaaataaacattatttttgacttaccttttaatttcttaatagcaaaaggattggtgattataatatttcttaccaatcctcctacaattaaatattcacatccgtatttctatgatattggagccataagtatttttcctgttcccctatatacgttaaccaatccctctcctgagactgcagatccaattaaacttttactagacttttcaactctaaactctaaagaattagaccaagcaattgcaaaattcccatcaatccgcacctcatcattatctaatataaattctatcaattcgcttcttggaacaggactttctagcactgctatgccttcaccttttagacacaaattaaatagtccttcattcccaagcattgccgaagagatatttgtcctcgcaactatcttttgctgaaccttagactcacacgctaagaaaagtccatcatctaaaaccatccctccccattccgaaacttcctcaagcaaaatatgcctatatgttggttctaacatcaataaaccatttccctgatattttggtttaatagcagactcttttgttacctttgatgatatagcttttccaaaaaaatcaccaattcccttaatatcagcagccatactcacagatcctgctgtccactgcattactccggaacttattgtgtaagcattaccattcaactcaattaaaacctgtctttttctaacattcatctctgaagcaaaatatgctgccattgcagttgtagtgcttacactcaaatcttttttatattcaagaaccttaacgccccctcttgattctacaatttcaatatttttattttcaaaaagattcttacattttaccatcgaaaattttctccccttattctttgaatatatatttcttatatagtctatgttaattaattacattattatgtatacagttaataataaagatttttatatacacataaaacaattaactaatttttttccacttataaaacggaatattcaaaaatacagtttgtagctcacttttttaaatataatacaatttcaacaggaacatttatttataaaacactaaaaactgtatttactatttaattatatttactcaagctcaagtaaaggcaacataaataaatcagataataaattaagccttataattaagatttaatttgctatctgatttatctttattaatgtttaaataaccaatccccatctttctattttatagactctctatactccttaaatgccttagctatactaggattactttctataaattgtacaaaatcctgaaagcattttgatgtttctttacttacagtatgttctatcttttctgtctcatctaatatttctttatcaggaatatcaagtatctttagaaaattctcaataatatgatgcctgttaagaagtgcagcgccaagttttttgccactttcttcaagtattataatcccatatttttcatactttacaagtctttcctctgataatttctgtaccattcttgtggcagaaggaggttgaacattaagtgcatttgaaagttcattaattcttaaataccctttattcaatgacaatctatatatcatctcaagataatcttccatggacgcagttagcttgctgtcctctttcttcatatattcgttaaaagtatagaaatcatttttgcccatatacttgctcgctccccgtaataatctacttaataaattatatgctttaatggcgaaaaagttactttactgtaacatttagaatattattgcataacttataatataaaataatttagactaggctaagaaagttaactgttaataactatcttaattacatataagattaaaaaattagacacataaaaaaataaagtaagaaaggtgatgtattttcttggagaacgaaagaggtttaagaagcactgatgtatctgtcactggatttgttccatttaaaaaagacaggagtgctaatattagtaaatttaggcaactattaaaatatttaggtccagcttttattgtaagtgtagcatatatagatcctggaaactttgcaactaatattagtggaggatcggaatttggctatgcgttaatttgggtaattttatttagtaacttaatggctatctttttacagataatgtctgcaaaattaggaatagccacaggccataaccttccagaaatgtgtgccaaagtattttctaaaaaaacaaattgggtattttggattgttgcagaaataggtgcaatggcaactgacttagcagaatttctaggtggaactttgggattatatttattgttccatataccaatgatatatgctgggattattacaggaataataacattcttcatttgttatatggaaaagtatggccaaaaaactatagaaataataatatcaattcttgttgcagtaatctgtattgcatatacaatagaattatttcttgccaaacctgattggtttcaagtaggcattcatacaataattccatcactgccaaatagtcaggcattattaatcgcagtaggaatgcttggtgcaacagttatgcctcacgtaatataccttcattcacatttggttcagcatagaggaactgatacatccattgaaggaaagctaaaacatttaaaaatggaaaaaattgatgtaacaatagctatgaatattgcctttatagtgaatgctgcaatggttattgtatccgctgctgtattcaataaaaatggattaattgttgatacaatggagcaagcccatgcatcattacaacctttactaggttcattatctagcggagcttttggaatagcattacttgcctcaggtttgtcatcatctgctgtgggtactatggcaggtcaaacaattatgaagggttttgtgaatttaagtataccaattaatattagaagacttataactatgatgcctgcattggctataattgcacttggaataaatccaatgaatgcccttgttttaagccaagtagcacttagcttcatattgccatttccgataatacaaatgctaactatagctagacgtaaggatttaatgggtattatggcaaatcgcaattgggtaagaattttaggtattatcatcgcagctataatcatatcactaaatatggttctcttatatttaacatttactggccaagcttaatagtaatattttaggagtgttttgtgattaagtctattaacatgttaaaagataaaaactcttcttttcggtcttccagagccttagaagagttttcttcccactattaatttaatctacacatttttgtatggacatcttataaaatataacttaaatatctttatgtatttaatagatattagtaattaaacgtaatttcgtttaaaaattcttaatcaccacacaaatttacaaccatatattaaatataagtaataattaagaaggaatgacatatatgatattaattttatctgctttattatttagtttatcttctaacttagataatttagttataggtattgcatatggaataaaaaaaataagaataaacacaactgcaaatcttatagtagcacttgtaacttctactggaacatttttatctatgttacttggcatatatgtatctaaatttttaccaagctttttatcaaatagcttaggtgctggaattattataattctaggattatactttgtaattcaaagtatttttaaacttataagtaataaaaaaataaaagaactcgctttaaagaatactaatgatatgattgaatatgcagaaaagtcagatttagataaatcaggagatatagataaaaaagaagctttttgggtagcttttgcattaacatttaataactttggtacaggagttgctgcaagtgtaacaggcgttaatatagaacttacagtcatattaacatttatattaagtatttgtacacttaaacttggcgaaagagctggaaaccatcttttaggcaagttcttaggtaaatttgctccgttaatttcaggactcttacttataagtctcgggatcatagaattatttaactaatagatttagattaaatatggtttactaaaatcgtaacataataaattgaagaacgattataaattttaggaatgaaagtatttctataaaaagaaatgctttcattctcaattttttatataaaatatcatttatacaaaaatattaaatatcatattttataattttagtcttttattgtagtcttttataatctcaatagattcttttaattctgccttttcactttcaactaagtgatattcaacaagctccttcactccttgattatttaaaaccgctggaacacctgcatatgtgtcactttccccatactctccattaagcatagccgatacaggaataactttattttcatcacgtaatattgcttttacaatctgaacagtagttgctgcaataccaaaagtagttgcacctttagcatttacaatacgatatgctattttcttaatatcttccgttactgaatttaaattaaagccttttaatctcattttattgtcattgattatatctaaaaactttttgcctccaactgtaatttgactccatggaattatctgcgaatctccatgttctcccatgcacaaagcatgaacactttgtggatcaacactcataacatcagctaaatgatatttcaaacgtgctgaatctagagctgttcctgttccaatgactttacttgccggtaaacctgaaagtttgtgcacgtaatatgacataacatcaacaggatttgttattacaactattatgcctgaaaatccacttttcataatgttcgggactatattattcattattcctgcagctttttctaacatatctaatcttgtttgccctgtaatataaggtaatgcagctgcgattacaactatatctgcatcattacattcttcgtactccccatcttttaccctcatcttacttccgctatatccaagagaatgttgcaaatccgttgcttcagcccatgatttttctttatttatatcaatcagtattaaatcatcgcaaacatgattcattaccatgtcaaatgctaccgctgccccaacagaacccgttccaactattactactttacttcttccaattgccatatatatccccctctactaattttgctataaattattatatcaaaaattagacctattatcatctaaccaattccactttagcataaaaacttattccttaatccaatagctgcttccatctttttttctttctataaaaccatactctattaaagctcttcttatggttacgtaatcctcatacactctctttagaatcctatttacctctttttcagaatattgctttccttttgaaaaatttcttgatatctcttctaatacaataatctttttcttttctctagctggataactctttaaaccaccattttcattcatataagtttcaataacactcttcttttctttatctgttatattatacctatcatctaaagtagttgctgttttataagcatcacatatagtctctttaccaattttattaattttcttatttgtggtctttgaaagcaaatccatcatagctaaaaataattttgcttgcttttccttttctcttaatttatacctatgatttcgtattgttgattgcgcaactttaagtttctctgaaatttctttatcagataatcccagggcaatcaattttattaattctctttgaacatctgatattccagtaaaaccagaattcatatttaacaaatattcaagcattgaaccgtggcttattttaagatgcaactctgctgatttctttgcatcatacagctttgaatttatttcatatattcttcctctctggaattcttcttcacatattatacacctatatccatcatcttcttcgagaatcccttctttaagctcacttatagtagcattccaaaataattcatttgattttatatccattaatctcattccctttcaatataattactttctatttaatatattacagacttttatttattttgtctatatataaataaacatttaccaccaatgtttgtattttatcattatcactttctaagtgtacctcatggtttttttcaatgttctatttatttcaaataaaaataggccaaccatctctatttattgtttatggttgacctattaatatattagatatatcttaaaacttacttgtatttttttaatactttcagatttgaaattctattattataattctaaaataagagcctatctctttgcatctgaatgctaattctatttctgcattcctcataatagttagattttagctttctaaacttgtagtaatcaaaactctctatagtatctttaggcgcgaaattaaagattgctacaataaaagctttagcctttcgttttaacttaacaaataagtttcctatttcatttttattcttcatatttatcttacctctactaattccaaatttcattccgtattttttataattcctttccttgaatactccctaaattctgcttcatgatattccatttaactcactccttctttaatatttttaaagtttttgaaacagcttatttaataataaactagaaccacaataatagtttacccttaccacaaattaaatgatatgtaaaaaattattataattaaactttcttaattccgactctttaatttagaatcagcaaaaaactgctgaatataattttcaacgcaatatccaactaataattaattagatattgagttgtatattatttacaacagtttctttataggattcctgtaccttgcaaatcattttatattataaatatgaacttcgtctttacttggccttactttttagcactatatgtgatgactctaatttttcattatttaacttaaatataatttttcttatactatcatctgaaagattatatgcctctgcaatatcaaaaactttttcgccttttttatataatttatatatttctaaatttctttctcttattgctcttttagtaccattactttctccccagccctttctttcttcagtcttaggaatataaatggtttctccttgaatatacttttgaagctctctcaaaagcttttctggcaggatatcctttccgtttttgtaacacacccttgatttcctccttaaaatttttaatattcaataatactacgttttttaaatttctcattgaaaccacctcctaataatttctataatcaaaattagattattactccttataattagattaagataaaaaaatcccgtggatactaattaatcatccatgggattacacataaaaaaactagataattactattgtctagtacttccttatgcttaaaaaatgcaataaaaaaaacacgataaccctcgtgtattctgcctagatatatattaattcttcagatgatggttaatactcttttgaaagcacaacgaatgaaaagtaagcataacatacttccattactctataaatattacaaaaaataattataaagttttctataatgactttcagcaatattcaattattttaaaaaaacctcaacacttttatttaataaaattttcatataaatatcctccttcatctgaattttgatcatttaactttcctaaataacccatataatatatattattcaaaataatgttttatgtcaatattctctaaaaatatttttaaattactcacaaatatacttttttagatatgtctaaaaatctttcaaaggaggatataatcctccttattttattggcagggttattagctcaaatttaagctgataaccacctcttattaattttcaatataatcatcccctctccattatatttaccggtaaattaattatcgcattatacgtatagacatctcaatggaaataatttttataattaatttttcttataaatttatctatctctaataaatttgtcaactctttcaaaagttggcatagcttcctgagctcctagtgcggttgttgaaatagcacctactgcatttccaaatattacgcattctttaagttctttttcttttgctagtgcaaaagaatctcccgctgcagttgtatctattggatcaataataaatcctggaactctaatacatttatctttcttaataattgcagccccatcactacctaactttgcaactataacttttactcccttatcaaataatgtttttgctgcttctacaaggttttcttcactatttatatttcttccaattaaagtctctaactctgtttcatttggtgttaaataatccacatatttaaaaatttcatcgggaagatccaacgctggtgctggatcaagtattactgtcttaccttgtttctttagttttttcatagttgcaattgctgtttctaatggaatttctaattgaaacaaaaatatatctgctctctcaatcaaactccatttgctttcaatataatttatatcaacttctgcattagctcctggaacaacaattatattattctctcccttattgcttacttgtatcactgccactccagaagatatacctttttcaatgcttactccatgagacttgacattattacttcttaaaacttctagatatctttttccatatatgtcttcccctatttttcctaccataagcacatctgaacccaatctacctagtgctattgcttgattaccaccttttcctcctggaaatgtattaaactctttccccatgacagtctgtcctgccgcaggaaaattttctactgtagttactaaatccatatttaaacttccaattacacatagacttttcatataatacgctcctcttcctacatcagattaaaacgaaatatatttctaatttaaatctagtattattatatcacaatttccattcctaaaaatttcactaactcaacatatgcttcgacactccaagaatcttgcatcactactattaaaatttctaaagttcgcttaaaccctaaacttagaaacaacgttggctaactcacttgaaatgttagccaaagtagtggcagatgcaaagaattcttcttgggttgctagctgttcttccactattgcagatatatctgtacttccttctagtgatttatttgaaatttcacatatattcttagatattttttcaattgcatttatttcattaaccattactaaaatttcatctgaaatattttttatttcaccgtcaacatcattgtttgactccacaatattcttaaatgctccttcaacttccaaaactttttccgagccactcattacctcgctaaccgcaatggacatacttttaatcaatacattaatataattttgaatttgagttaaaattttagatatctctacagtagatgttgcagaacttgttgctagtttgcgaatttcatctgatacaactgcaaatccttttccatattcacctgctctagctgcttcaatcgcagcatttagagccaacaactccgtactggctgtaattttagaaatagtatctagtatcgtttctatttgcgatgaattttcttttaaaataccagttaccgattggatattcataacctgttctttaatagtgttcatttgatttaacatggatctaactttctcatttccgccttcagctattttaagagatttattagccaaagataaaacattatttgacttttcttttattgtactattcattttaataagtctattaactgcttcttcagtcctttttgcttcactaaattgatactgcgaaccatcgacagcatcttgagtagatactgcaatctgattaactgctttgacactttccttcgccctatccttgatcatagtagaagattcatacaaatccttactattattaataatccccttaatcatagttcttagattttttgtcatttcgttaaaagaacttgccaataaagatacttcatcgttagaattcactttatattcttctacctgtaaatttccattagcaatatcatcagctaatagtacaattttattcaatgattttcctaactttatcgaaaagaaaatagcaaaaattatgctaaaaaaacctatggatactataaaaacaatgattagcactcctgtaaaattagattttttagccaaatctgctctagctttattttgttggtctaattcgactgacatatattcctgcatgctattttgaattagtttagaaaacctgttcataagtttatttttttccaccatttcagtggcattcttactttcaaaaagttttatattttcctctgaataagactctaacattctgcttacggcatcaaaagatttcagcgccttctctccagatacattatctttaataaactcttgatttttattaatatttataaatttatcatctataatttttttattctctgctgttgggtttaatatatattttgatatatcctgaggaattgagtttattaaaattattatatcattcgccataacatttttttcaatcataatattttcttgcaccaaataagacctcatagtcatataagatgttattcctactgcagatatcaagaatactattaatgagaagcttataataagctttgattttattgttaagggaattcttcctggaactgagcttatttttttcatcttgaagtttctccttcctcttatgtcattgattctataaaattttcagatataatattaacttctaaataatatctatatattatttaattggtgctccaaaagtatattcataccattgatcaggtgtttgagttttcaatccaaatatagtatctccgtcttttgtcaccataggtatattaggtgtaataatatcatgtggcattgaaccatttttagtgattatattaagtaaagttctcattccaatatcagatattaaaggcgtgtatggtgtattcacttcaaacaatccatcttttacggatgtaattgcttttttagaatcatcaattgataaaaacatcatctttttatcatcctttctgctatttaatctattagcattttttgatgcatcataagcagcaattgcttcatgatcacctgttccaaatacaacatcaatagaaggatattcatttaatgctaattgcatattggcaagtgcttctgctgtattatcatcatcatgatatgattttaatatatgaatatcagggaaataacttagtaccttaagaaaatgaccagttctattagcatctgcagtacttccagaaggctttctaagaagaactacatttgcatttagactgccttcttttgcaagtttccaaattaaatacataccacactgagcgccatttgctggaaaattcccggtaactctactcgtggtttcctcgagtcctgtcattctatcaacgcttacaactggtatacctgcctcaatagccctttttactggtgcaatagttgtttctgattcaaccataggccaagttaaaatcccatccactttctgcaaaacaaaactatctataatatccgccattctatcgttgtcccattgagcatctttaacatcaacttcgacgtttggatgtctttctgcttcccattgagctgcatcagctaaactaacattccatggctgatcaaatccatgaatagcaacaccaattctatactttttatttaagtctccaactggtcctgattttaaagccacataatttgaaaatggtaatttcaaatccagctcgctaaatgctccttttatcttagttccatctccatttgtccatttatagttaccgaaaggctttcccgtaggatatgtactcatataagtttcaaatttttcattcttatatatatccgtaatctctttatttgcatctgaaagaggtaaattaataaaaaattctaatatatccctatccgataacccttttgatttaagactttcaaaaaaatccaatgcctcttgtccttttaaatttcttacctgatcgtacaacggtgccaaattcactgatttctcatttgttacagtttgtgttggaacttcttcaatataatctttttgcctgtcttcttttggttccttatcaacaattactttacctacttgggaacaagctgataaaatacttccaaccaaaattattaatacaatgcaacttaatttgcgtaacctaaaatttaatatttccattttgactttcctccttggtagcatctaatcatattagtaattcaatccttttaatacacaataactacttagatatcatatttgttaaatttataacaaatatgagcctcttaaaaaacgtttacacaacttgtattcctcccttgcaaactatcttttttaatacaaacttattgtaatgttatattcactactatattaaaatacttctataatttctataattctacaataatttcaaaaatcctttattttatacttcttaataaatgttatttttacagtataatattacttcggagatttaaggtaaagtatatataataattattcttatacatcaaccttaaaaataaaaagctctcaacatacattgagagcttcacttgtattaattaaatgctaaaaattattattttcaaaatatatatttgtaaacttctttaaaacttgatatgaaattctaaagcttgtacaaaacttatattcctagataccaacatctttaatttctaaaataaacttactactatcattttagcaagttctcacataacttaaaattatgttaatcatattaggtattttgacattttaaaacatacgctggtggtatatttaacactactctttctaaacttatatcttcaaaataacttcctatatatccctttttaagcaatgtatattgaaatgttatgaataatccattcttttttaatatatcttttgtttttttcaatatactatttgacatattctttggcaaactagcaaatggtaatcctgatacaacatagtctacttctttaatattgtattcttttaaatatttatctacattttcagctgaatcatttactattacaacgttattatattcaccatacttttcctctagttctctgcagaattcttcattatattctacgagcattaacatcgtatgatcctttatttttttcattagtctatcagtaaacactcctgttccaggaccatactccacaatacattttgcatggtcaaaatcaatatcatgcgccattttttccgcaagctttttagaactaggagctacagctccaacagttcttggcgacttaaaatattccattaagaactttatccacataataatacaaccctctctatattttcttaattagaatacatattttattgaacttaaacaaactaaataaaatatatattctattattaacaaaagagactacccctcgatttttaaaaactagagataatctaaaatattctataaatttctttctaactattttcttatttaattacagcacttctatatagacatgcacagttttaaaagtacatctctgttagcgaattttacatagctaacaatgtttagatgatgagtctccaacacagtgtaaaaatcaaaaactactttagaatccaaattttttcaacctctaaattataacataataaggaaataaattcaatgttttacataaactaattatgtgaaaatttattattttaattttattaaggtctaataatttaaaaattacgaataatcatgcttattctttacaaaacaaatatattcattattatttacaatataatttcaaccccaaatgtaatcttagtatatttcttagattataatatatgtttaactttttgctttatgtcttcttaaaaaggaacatacatcataaatatatataggggataattcgatatctatgcctcctaaacttgtcattgaagaagctttactaaaatttttattttaatccaagtttcaaataaatctattttcttttccatatgctgtagaattatccccttgtacttataaatccttcttggttaatataaatagaaagttatattcaaaacttaatatggatatatagttattaatacatccaatacaaaataaaggcataaatctgcattgtaaaatagctacttcaaaacagatatctatcctctattttgaaatagctaacacaaaatataaaattataaattttcttttataagattaatcctcttaacatattcttcatcacttaaatattttttctgaggattcatttcaaatacaccaccccatgaatatccatctttatacttaggaactaaatgaaagtgaagatgtggaagtgtatctgaatatgctccataatttattttatcaggtgaaaaagtttttttaatcatagccgctgctctagtgacatctttcatatataattctaattccttatcatccaattcaaataattctttcacatgtttgtcatacgcaacaatgcatcttcctttatggctttgttctttgaacaaataaagagttgacacttcaagcttacatatttcaatcattaaattatcaagtttttcatccttatcacaataaagacaattatttttattactcatatttcagtctcctaacctaattttttatagacatatattaataacatttttatatttaatagtacaattaattatttaggatatacctttatattcttacagacaatatagaagctatcaaaataatattttagtacagttgaaattaaaattagctgccttaaaatagcaatttactttctatcttaagacagctataataactaaattgaaacgtatctagagattatgatgattttgagctatttttatattttaatattctattagtcaaaagaattaatttatactactgtttctttccaaacattttcatacttatatccagtaagattttcaacaattgtttttgtttctggagttacttcttcttttgaaccattattctttagacgttcaacttcatccactaatataccatgtgttcttttattaagtttgaaagttgccgcacaaattaatgcaattacaagtaaagatatacatccaacagctaaaagagtagctatagttgatacaacttgtggtgattgagttgcctgtcctttaacgaatccgctttcttgcaatacaacacctataacaaatgtagctattgccacactgctttttctagtaaatgtcataactgctgcaaaaagcccttctcttctttgtcttgtaaccatttcatcaacatcaggaatgaatgggaatacattccatggagtaaactctaataaacttcttcctacttgataaattgtaccaattacaaataataaaacaatattcgatcctaaatttcctacataaagtccataaaatgctaataaacatacaatcataatagaataagccatcttatataagttacctggtccaactttaatcattaagaatccgcctaatattgttacaggaataccaatgatgctaagtgaaagtacattcgcagcagtagtagatgaaacacctaaattaaatacacagaaatatataaatactgaattaaataagtctttagcagtaaatgaacatatataaattgctaaatgttgtctaaatgctctgatcttaaatgttgaaacatagtcaccagcaacctttacaatagtcattaattgttcgccaaagctcttgcttgtagaaccatttaatagttcttgttccatttcaggtgtaaggtccctttcccatgttactttatgtgatataagtatacatattgcatatataatagcaaaaactaatccattaatgaaatatgcttgtgggctcttgtcaccaaagaaagctattaatcttcctggaacaaaagtagctaaaaatgtacctgttgccgaaataaacattctcgatgctgataatttagttctgtcagtaaaatcttttgtcatttcagcaggtaatgtctcccatggaattaataccatagctgcaattatttcaaataacaaataagtaactaaatagaatgcataacttcttcctgttacccatagtaatacgtaatctgccattaacggagctccgattaataagaagaaacgacgtctaccaaaaagttttccaagtttagttttatagaagttatcagatatactaccgataaataaactagcaactgcatccactatacgagcgatagcgataatagaagcaccttctatcggtgttaatcctgcaaatgttgtatagaaaaatagtaagaaagctccaataatggtgaatgctccaccacccattaaatcaactagtccataaccaacgcctctagctatcgtgatttttctattattatttgacatatatttttcctcactttcatcaattaagtgttcccgaattatttttcatcaaatccaaaatattcttttgcattgctgtagcatataccttgaacaattcttttaagtaatttatcatttttaggtacttctccgttttctacccattctccaattaaattacaagcaattcttctaaagtattcatgcctagtatatgataagaaacttctagaatcagttaacattccaacaaagcgtcctagcaatccaaggtttcctaatgccttcatttgttcaatcattccatccttattatcattgaaccaccacgctgcaccaaattgcatttttcctggaataccatctccttgaaagtttcctatcatagttccaagaacatagttatcctttggatttaatgtatataaaattgtttttggaagagaattttctctgtccacagaatctaaaagtctagaaagtggataagctatgctttcatcattaattgaatcaaaacctgtatttactcctattttttcaagcatttttgtattattacttctaagagctgcaatatggagctgcatagtccaccctaattcatgataaagcttgaatacatgtcttaatgtataagttttatacttcttttcttcatcaatgcttatagatttaccttctaaagctttagcaaatattgcttctgcttcttcttttgatgaatctgcataaactactacaccatctataccatgatctgctattctgcatccaactgaatggaaaaatcttattcttgaatcaagagcttttaaaaattcatcataattatttatagatacttcagatactttttctaaatcttttacccaagaaacaaaaccatctaaattgatttcaattcctttatctggtctaagagtgggtaaaacatttacattaaagctagcatcttctttaatttttatatgatattctaatgtatctataggatcatctgttgtacatatagtttcaacgtttgattttataattaaatctctaacattaaaaccttctccatttaataattcattagctctcttccaaatttcaggagcagtatcttcatcaagcggttcatatattccaaagaatctttgaagttctaaatgagtccaatgataaagaggatttcctatagccataggtatcgtttgcgaccaagctaagaatttgtcataatcacttccatctcctgtaatgcatttttcatctatgccattacttctcatagctctccacttataatgatcaccataaagccacgcttcagttatattactgaattttttgttttcatatatttctttgggatcaatatgacagtgataatcaataataggcaagttcttagcataattatgatataaatctatagctgtttgattagatagtaaaaaattctcatccatgaaatttttcatattcttcatcctactctctcaaataaatattttatatttgtaaagcattgaatatttgggttaataacacgcagtatataaattcacgtacattattgtaatttgcatttactcaatactttaccacaacgttttcttaaattttatatattaaccttattgttatgttttggattcttatattcttatattcgctaatttaacttccttaccttataatactaaaagttttatatcatccttttagtataagtgcaaagttgttaattagcattgcttatgttataatgtacttcatattaattttcttaaacattctttatcgttcttcacttatattatttggcagaatataataaatgaagaatgataaaaatgtttatttttttgcatcttcgagcattatctctgattatttacaatctaaatatttttctaaagttgctctaactgcaccagcacctgaaatcaattcattgaaataaccttcaattttctcgcctaaacctatagtgtaaagatttactccaaaaatttcttcatttataagtattgattttaagctactttctactgattctttagaacctaattttatatctgctacatatttttttaattcatctaataaaggatctggacttaactccataacattaccattatcatctaatcccattagatatctgcaccagcctgctataactagaggaatgtatttaagttctttagcatctaaatcttctctcttactataagctttaattgtttctccaaatcttataccaactttttgagatgtatctgaagcaattctttgtggtgtatcaggtatatatggatttggaagtctaacttcaactacctctttaatgaaatcttctggatttaatattcctggatttacaacaacaggcattccttcttcatatccaattttttcaactaacttctttaaagctggatctttcatttcatctgcaattaaatcaaatccaagtaagcatccaaaaactgctagagacgtatgtagtggatttaaacaagtagttaccttcattgtttcaactctttccacagtttctctatttgttaaaaatacacctgcttcttctaaaggcatacgtccatttgggaagttatcttctattacaagatattgaggcccttctgcatttacaaaaggtgcaatataagtatttttgctagttgttacaatcttagtgctatcaaaaccaactgcttctaatgtattcttaacactttgagatggtctaggtgtaattttatctatcatactccaagggaaagatacctttttagtatcattgatatattcaaggaaccctttatcaactaatccattctcaacccagttctttatcattatttccattgcattgtgaagcttctcaccattctttgaacaattatccatacttacaaaagctattggaagttgtccgttttgatatcttacatatgctagggacgcaactttagctataatacttacaggatgctctagaccatctgttgtatcttgttgtgataaattcttaacactataacctttttctgttattgtaaagcttgctatttgtaaagatggatttgaaaatatctcttttaacctattccaatcttcttctcttgagtaatcaccagctaagctttcgcctatacttcctactacctttttatctaggctaccatctggtttcataattactagtaagcttaaattatcataaggagaataaatttcatctataatttcatagtcatatccttctacagcaacaataccagatttcgctttcccagtatttaaaagttcctgttgtagtattgctataaatcctctgaatatatttcctgctccaaaatgaacccatgtaggattttctttagttgatgctgacatcttatcataatcaaactttggaatttcaatcccagctttttcccataaatcactatttttgatactttctttacttaatactattttggcgttattcatttttttcacctctttaaaactattgctaataaagtcaatactattaattatcttttgtatcttaagattctatgagccaaaatttttttaatcaaaattttagtttatctcttttatttatttctttcaagagaatcccatattccccataaatacataattccaagtgctctatcataaagtccataacctggtctgcattgttcattccaaatatgtcttccatggtctggtcttacatatccagtaaatccaacttcgtgataagctttaactatatcacatatatctaatgaaccatcacaagttctatgagatgtttcaataaaatcaccattctcataaatcttaacatttctaatatgagcaaaagcaatcctattaccgaattctcttatcatagctggtacattattatttggatctgaacctatagcaccactgcaaagagttaagcaattatatggattatcaacaagccttaataatcttgctaaatcatctctgttcttaactattcttggtaacccaaatattggccaaggtggatcatccggatgtactgccattttaatatcatttatttcagctacagaaataatttgttctaagaagtattttaagttattccataagtcttcttctgttacattcttatatgcttcaaaaagctgtgataaattctttagtctttctggttcccagcctggcattgtaagatctggattagacgcaattttgttaactaactccattggatcaatatctttaatctttgctttttcataaaaaagagctgttgatccatcttctgccttcttgaataaatctgttctaagccagtcaaatacaggcatgaaattatagcagattactttaacaccaaccttagctaacttttctattgtctttttataattttctatatatttatctcttgttggtaaacctaatttaatgtcttcatgaacattaacgctttcaacaacatccatattaaatccatacttgtcagctgatttttttacttcaaggatcttttccattggccattcttcacctgctgccatatcatgaagagcccaaacaattcctccaactccaggaatttgttttatttgttcaagtgtaacggtatcattgccttctccgtaccatctaaaacccattttcatagtaatgtccctcctgtcacttcatttaattataatttcaatatataatatctcaaaacatatataaaattaatacacttaaatttaatgctgcttatatataagcctcacctcctttaatttaaaataataatcttagtattacatgattatttaacagctttgatcatattaaaacttaaatcaatctttatttaaaataattaggatacttctcttttattttatttttatcaaaagtaaccatatttaaatgttccttcataaagtcttctgctatctctgggctcttgttttttatagcattaaaaatttctttatgctgaagataaatattgtcccagctagaattagttactaatctaagcatacgaattctttgaaactcagtactgccatcattaatactattccatactctttttttattacttccctcgaaaattatcttatgaaattcttcatctgcctcaaataactttttataatcattattttctatatacattttttgaagtttcaaattcatttctaaagctagtacattttcttgtgaaaattctttacaagcttcctttacaactgctctttctaaatgttcacgtaaaaatcttccttcttcaactgcagataaatcaattaaagaaacaactgtgcctttttgaggataaatattaactagcccctcttgagctaatctaacaagtgcttctcttactggagttctactcacactatacttttccgaaagttccttttccgaaatactagtaccaggctcaagatataaattaataatttcatctctaagtttataatatatagttttacttgttgtattcttatttacctctaaagccatttttatattctcccttactttcaagttctaccatacttgtatggtagttatatttatattttatcataagtattttaaaaaatctattatcaatccatactgccatacttgtatggtagttatgttttaataataatcataaccgtttacaatgtcaagataaatatttaattattttttgaaatgcatcaacttacaatatagttagcaataatgagaatatggtagaaaaatgcaatataattgcacgtatttcatatatacgccgattttttagaccttgagtataatattggttagatatattatcaatatggaaatttattatgtttgaaaggggaatattatgctgaaaaatattaaaattatcaatagtattattttgatggttatcttatcaacggttgtatcgttatctatcgcaataattggttataataacatgaaaacgattaacttgaattcatcatcaatgtacacaattgcgttaacaagaattattaagactgaggaaattagacaaacattcttaaatattcggttaaatgtcaatagaatttctatatctgaatttaatgatgatgatgtagcagctatagataatgactactctgccataaacaaaatggtggaagattacgaaaatctatcgcttagcactatagaaacaaacaatttatccgaatttaagaaggactcctcagcttattatgaacaaattaagaatcttgaaaaaggcaataaattatatggtatagatttagaaaaatttaatcaattaggagttgaaatgcaactttttcttgataatctagtaacttatagttcaaatactgctaatactctgcataatgacaatatgagtttatacattagaagcactaaaatcttttttaccactttcttcattggctttattcttcagatacttgtttcctcctctataatcttggttataagaaagtctataaaggagataatgtccgatttagataatgttgctcagggtgactttagttttgaaataagcactaatttaaaaaacgaatttggcagaatgaaaaaatcactcaaagtaacaacttcaaacatctcctccatgctcgaagaagtgcaaaattcagcaaatgttgtaaatatacaagcaactaatttattaggagcttcagatgaaatgtcttcttctgcacaagaaattaatgctgctgttcaagaagtagctaatgctgccactgaacaatctagtgacctaatgaatgtaaaaacttcattggatagtttcgctgattcactagatcaaataacctcgtcaattaatgatgtaaactcaaatatacataatattagttcaatggccgaagatagtaactctaagttagaatttttatttaattctattaaagatgtaaacgaatcttttgatactgtaagaaataaggttgttcaattagataatcatgtggaacaagtgaataacataactactattataaattcaattgctgatcaaaccgacttattagcattaaatgctgcaattgagtctgctcgtgcaggggaagtagggcgtggattctctgtagttgcagaggaaatcagaaaactcgcggaacaatctaaagtatctgcaagtaatataagtgacttgattactaatattaataacgaagcccaaatagcggttaagactactgatttaggtaaagatagcttaaataatcaatcagtccttattgaagattctataaaatcttttgctttaatatttaaggctataaatactatattgcctagagttgataatataaataaatctattgaaaatataaatattgaaaaagatctcataatctcaaaaacgttagatatttctggagtatcagaagaaaatgcagcttcatctgaagaaatagcagcctcagtacaacaaataaattcatcttttaatgatgtagcaacttcagcccaaactttatcaaatttaacaacctctatgatgaatgaagtaagtaaatttaaattataattgttgttatacataacttaagatatattttgcaattttaaactcgagagcattatatctaaattaaaatggaggataattatgaaaaattttaaatttctaaatgttacgcttgtaatagtttttatgacgactatattaacaggctgcggttcaaaaaatgtttccaaagcaatgcagcctatcactttaaatataatagatgtttcaggaagcatgcaattagtcggagattccatagatcaatttaaagctgcaaaccctgatttaataggagatgtcgtagtaaaaaaatctactgcattagaggttccatctttattaaaagctcaaattttatctgaagatatgcaaacaaatttgatttttactggaattgatggtctttccacatgtattgatagagatgttatagaaaacattatgactgcatatagcagcagatttcctgatttagaaagtaattatagttctggcgctaaagccacttatgatttagtaaagggttatgggataacttatgtgtattcacctagcggcccattctttacttataacccagataccgtacaaaatatacctaaaacgcctgatgagcttttagctttcgctaaagctaatcctggaaaattcacatatgcaagacccgcgggttcaggaccaggcagaatttttcttcaagggttaccatatattcttggagacaaggatcctaaagatcctaaaacttgggacaagacttgggcttatcttaaagaattgaatcaatacatagattattatcccgctaaaactggtactacattcacagaattaaaagacggaaaaagatctattatagcaagtcagttaggatgggatatgaatcagagaatcataggtggtattccacaaacttatcaaggatttatattaaacaatactacattggttgcagatgctcagtatatggcaattccaaaaggacttagcgatgaacaaaaaaatgtagttttaaaactaatggcatggcttatgacgccaaagatgcaggcaataacatacgatagcggttatttttatcctggaccttctgtaaaaaatgtttcacttgatatggctccaaaagaaagtcaagataaaataaaaccagctataagacaatcttatgaagattctattaatacacttccaaattcgacgcaattagacacaactaaattcatggacgctttaaatatgtgggatcaattatttggaactaaagtaaaaagataataatggaattaagaaacgtgctatattgctgaatcaaacaatatagcacgtttttatatcctaaatctataattaataattacttactttgctttacatcctcatctaacagatgataaggataagtagatacaattatgttatcattcttcaataaggtttctctaataaagaaacttgtatgattatgtaaaacctcaccaaatctttcattagtaacaaattgaggcactattactgttatcttctcatctttagctgttgaatttgcaatcaattctatattctttaataaaggagtaaccacagctctatatggagaatattttgcgacaagtaatatatctgtatctaactcactccatctagattttaatttttccatagcttccttgtctggtgaaatattaagagcaataacattatcgcttacactttgagcatattgcaatgcacctattgttgctttatttaagctagcaattgggactataacaatatgagtatatttctttcttaaattcacctttttcagatttaattgactaatacttaaaccacaagccactttatcgtagtgtttttttattcttagctgaattacaattatgattggaattaaaattgcaactataaatgcaccttcactgaatttttcaattaaaattattatcgttgttaataaagtaacaacagaaccaataccgttgattattgcacgttttacccaacccttacctttttcttttctccaatgattcaccattccaaattgtcctagagtaaaagatataaatactcctatagcatatagcggaatcaacctatgagtatcggccttaaatacaataactaaaatacaagctatacatgataatgcaacgattccaaaagaaaaactaagtcgtttacctctaatagtgaattgtcgtggtgcaaaaccatccttcccaactatatacattagcattggaaatcctgtatatgctgtattgcatgccataagtaaaattacagcagtgctaaactgaattatatagtacattatgccattgccgaaaatagcaaatgctatttgtgaaacaactgtaggaccatttgctattggtacagctgtataaaatatggcaagcaccgaagttcctccaaatatgaaaaatattaaagctgctaataatatcataacagtctttgcacttttttggctcggttcttgaaaatttggaacagaattacttactgcctccactccagttaaagcagaacatcctgatgaaaaagctcttaaaataagaaatatcgatacattttctgtagtatttgctgggatagaatacattggttctggatgaatatttaatataaaatacttaaacaaaccataaagtatcataaaagccatgctaaaaataaaaatatacgtaggtatagcaaaaatttttgaagattcacttatacctcttaaatttaaaatagtcaaaactataattattattaaaacaaacatgactttatattctgtcaaattgctaaatgcagaaataatagcatccgcacctgcgctggcgctaactgcgacagtaagtatataactaattattagacctgcaccagctgctaagccagattttttccctatattttcatttgctactttgtaagctcctccaccttgaggataagccctaataatctgaatatacgaaattgttaatattattaataatcctataatcataaaagaggtccatgttaaccactgatatgctgctacacctagaactattaaaacaaaaagaatctcctgagcagcataggcaacagatgatattgcatcacttgccataattgctaatccaaaaggaatattatacttttcattacatccttgttcatttgataaaggttctcctaataaaacatctaaaaactttgtaagcatttattttccccctatattatcatacgaaaaatattgtatgtaataatgaaatcaaaagcaatattctaattattgcatatattgaagaaaaatgtagaatttgcctcatgaatacgaatacatatataattatcactgatttcttcttttaatgaattatttttaactttgttattacacctgtatttcaatttaatttccacatattagccttaattaatcacttgacttataataattataaatatagctttatgattttaatatatattaagaaattctgatttagtatgattaaagttttcctaatttaactcaaaattattacaaatttcaaatctttgatttgtattttgaaacagtaattctataaatatctcaattctacttcatgaaaactaataaatttaaatatacaagttaatcttactaaaatggacttctatatttttgtaattttacggaataattgttaataaaataataatgatattacttttaatcttttttgcttttactcattattttgatataatcaaattgtaaagctaatatataagaggaggattttatggcacaaaaccatatatgtgaattatgcaatagaaatgtttctagcattactaaacatcacttaattcccttagaaaaaggcggagaaaaatttaaaacactctctttatgttcaacctgtcatagacaaattcatgctcttttcacgaatcgtgaattagcaacacactatcgaagtcttgaatcattaaagaaagatataaagatagttaaatttcttaaattcattcagaatattcctggtgattcttatttagacataaaaaaatcaagacatgtacgaaaaagttgttaggatgatatttaaatattttatgtgcaaaaataatggcaataatcttactaagattattgcctaaaattatataatttatcaactctgaatttgtatgataataagttttgatcccattataataattttattatatattaacttattttaaaatacataggctgtaatgctaatccacttttttctgataaaaatatattacctttgcactggaatcctgcctttttataaaaattaattgtatctaatcttgcatttaaatataaacatataattccaagctctttagccttaattttatgtgtttttagcatttcaatgccaatgcctttacccacatattcttgactaacaactatattggtcattttaccattcatattataattggtcattcttgaatatgcaacaacagccccctcatctaatgctaccaaatgtatactgctataatctaattcatcatagtcgtatttatgaattagattatatggtttaaaaagtattttaaaccttaattcagatacttctttaaactctttacttttataatttataaattcatatgtaatattattcatatttcttccccaacttctgtattattataattacattatacactatattcataataattgaatatttattcatattttttatttattattgtatattttatttaataactatagctctcggtctatgtttctttagaaatactaataaatatattttttatcctgaacaaattttattatattaaattataaaaatataaaactaccaactaagcacttatctagcaacctaattagtagttataaaataaactatacttttctattaattttatgtaaaaacaaatattacgatctatcttcccattttctctttgccttcattacgttttcttcgcttaattttgtttcctccattatatctcccattccgcaacctttatcaagcatctcttttgctttttccatggctttttcatgttcaccttttcttaatttttccattaaagttcctcctctttcgactcatactaactctaaatctagtattacctgtgaacacttttttattcagcttttatgatagcttcttcatcacttttttcatgcatctaatctttatgttatttctttatttccatcttcttctgaaaaaattatattaatatgtagttcagaatttcatcctcatctataatttttttagcaagaattctattttcatctacatgaatatacgtatatctattaggttttattgatggagcaatatcaatagcatttttataatctttccttttcatttttaaagtttttgcatgctcgaaaaagtttgtttcttttaatatcttcgatattctttcaaatctatgatcttgtactttcgccataatatatgttgcaattccaacctgtattccatgaagctgaggcatttctaaaaatttatctaatgcatgagatattagatgctctgaaccagaggccggcgagctattacctgctatttccatagaaataccattcaatattaatgaatccactaattccttcagaaacaaatcatctttaatatttttaaactcagttcttataaaactattgactgctttcttagaaatcatagtagcaaaatcatcaataattatccttccattttcttcttcaaatttccaatcatacaacgcagtaatatttgataccaaatctcctatccccgaatatataaatttttctggtgcactcttaataacatcaatatctacaattattccataaggagttttagctggcagagacattctcctgccattaactaagagagatgcacctgcacttgagaaaccatcattagaagttgaggttggaatactaacaaaaggtaattttctcaaaaaactcatatacttaacagcatctatggccttccctccaccaactccaattagagcctctacatcatttgatatttcaaatgcttttacactaattttttcgaaatttatatctgatattgtttctattcttgaaatacctatattagcctcttttaaagaattacgtatagactctccaaataattcttctaaaccctcgccaaagcatattaaaacatttttaaacatggctttcttaatcaagttacctacattatttatatttccttttcctacctctaaaatagaaggaatggctattctatgagttgacgtcttcatgcatttcactcctcaaaagtattttgaatttattaaaatatcaatttttatatcttaaaattagctttccctaggtagaaaataaaaaacatttattattttaaatcattaactactttgtttatcttatctgccttatccaaagcctctgtccataattcctttgaaggaattattttttctactgttgtatacgcttctcttataattggtatattaataagatttgtactttgaatagacatcaatataaaccagcacacacctataagggctgctattcttatgatacctgctattgctttaattaatatataaagagcaataatggcaactattattaaaactatagtatttgttgttaaatgtattggcgtattttttatcaagctatttactttatccatttgtttcctcctaagttagatagttaatattatattaaacttgttaactagtatacttccttaaatttcaatttttcttgtgcttataatagcggttgctttggtataattaatgcacaaattatatataagagtaatcctgatcccgcacaaacaatcaaaattgcccacccaattctgactaatgttgaatcaagtccaaagtattcagctatccccccgcatacccctgctaactttttatctgttgctgctagatagagtcttttctccataatagatttcctcctaaattgctataacatatcatttgaacatagttctttttcaaaattatatcactttagaattctatttactattattgaggtatatattttttagtgctaatatgcgttcatacacatcattactaaaacatgatatttgtatattaaaaattctatataggaatctgattattttttcagctttccaccccaaaaggcattacccattgtcttacataatatatcttttaaatctagcataataaagggaaagaacaattcactaacacatgaaccattctttcccttttaatgatttataatagaaatcattaaattatcacttattatgggaagattttaatctgtatactacataataaacagtttatctttccattgtttttaatctatttcatatatccacctttcattggtgatactgcatgttctgaaaaaatctttagaattccagattcgtattttgattttcgtggtttccaattctttctacgttcttcaaaaactttctccacttcttctttactgcatttttttccctttataccaacgatctgtaatactctattaggaatactaatttcaatcaaatcatcttcttcaattaatgcaattggtcctcctactgcggcctctggtgatacgtgtccaattgccggtcctttagaagctcctgagaatctaccatctgttattaacgctatactagcagctaattcttcatccgaagcaattgcttctgttgtatagaacatttctggcattccgctaccttttggtccttcatatcttataataaccgcatcccctggacgaattatttttcttaagactgcatcaatagcttcctcttcactatcaaaaggttttgcttttaatatggcctcatgcatttctttaggaactgcagaatgttttactacagcaccttctggcgctatatttccctttaatatcgatacagaaccattagtaccaatagcattattaaatggacgaataacatcttctttttttagtcctactttttcaagatactcattgcacttctcataatatccgttagtttttaattcttctaagttttcacctaaagtcttacccgttacagtcataacatccaaatgaagcaagtgctttagctcttccattattgctggtacaccacctgcataatagaaatattgcgcaggccattttccagcaggacgtatgtttagtaaataatgtgcatctttgtgtattctatcaaaagtctcttcatcgatatacaatccaaattcatgagctatagcaggtaaatgcaacagtgagttagtagaccccgatatagctgcatgaactaatatagcattttcaaaggatttaattgtaacaatatcttttggacgaagattcattttagctagttcaacggcttgtcttcctgcttttaacgctacttcttctaaatcttcacatgttgctggcatcaatgagctacctggaagcattaatccaagtgcttctgccataacctgcattgtagctgctgttcccatgaatgaacaagctccgcaagatgggcatgcgttttctttataaaaagttaatttttcttctgaaatttctcctctttgacacattgcactataagcacctatttgttctagtgtcaataaatcaggacctgcttccattactcctccagtaacgatgatagatggtatgtttaatcttccaattgacataagatgtgatggaactgctttatcacaacttgaaataaatacgcctccatcgaatggtgttgcattagcatggatttctattaaagacgttaatgtatctctagacgctaaggagtaatttattccatcatgcccttgtgacattccatcacaaatatccgttgcaaaatacctagcacctttcccacctgattgtgtaatcccttcaactgctttgttagcaaatttcaatagatgcgcacttccaggatgactatctccaaatgtactttctactataatttgtggctttgataaatcttctgttgtccatcccattcctcttcgaagtggatccatctctggagcaatttttcttacttcttgactaatcatactatttctctccttaatctttatttgacaccgtttaaatacatctgatgtatttatgatatcacatctgatgtatttgtcaattttttttgaattcattgttttaattcttatttttctataaaaagcaatataaaacatgcatattcatctgatgtatttaaaatagcagcaaaaaaatacacctttctccaaaacaagagcagatgtatttcatcaagtcaaaacaattaataatttttttccttcgctataatacttgcgatattccttcgattatatactaagtgtaagagcatcgcatcatgggctccattagcattatgttccttaattgaatttaaaatttccctatgcgtctctattgtttcattacgtaattttctatttgtaatatctataaatatagtaatagatctattaattattggaattaaattaaccataaccaaattcttactactcttagctattgcagtatgaaattctatatctttctctaaatatggttcatttttcaagataaggctctctatttcgtcacataggctagacatttgttcgatttcttcatcggtagcttttgtagcagctatagatgctattgatggttctatcataaatcttacttccaataaatcaagcgctaatttatatttatcttttacaaacgttaatcctaggggatcatcagcaattccacatttatcagaaataaaagttccagctccacgtctaatttctaaaacattccgtgaaaccaaagcctttatagcttctcttatagtgcttcttcctacattaaggctacttgcaagatcatattcattaggtaacttatctccagatttccaatcattatctataatcaatcgaacaattctttctgaagtttgctctcctagtgattttgttgaactatttgtatcattaaaactcaattctctaatatctgacatattccctccaaatgctactatcttgcagcttaaaagttctttcgaaagtattttctaaccctgccaacttaacccgctttattattttaaaaaataagttttatcccccaagttatacatccgctgttaagcatgataaataatatggaggacaattaaaatgttagcattcacttattataatacttaaaaatacagcaatttaaaagaccttttaaaatatatttttaatgcaccaatttccctctttaaaatcctgtacactttctataattatttataaagtatttaaattctctatttactataatctgcactgctttagtattaaaatttttcaaagattctgattaattattattcatttataaaagctagctacgccgccctccacttccgtttatttttataatctcataattccccaatgtatacacaattatatcactaaagacttatataataagctatttagcatttaataaattcatagttttttgtacaataaaaacggccctaagttataacacttagagccaaatattttattgtataattaattattgttctttcgtgcaaaatacggcattataaatcctagcccaagtaatacaaaaggagttataatattaagaaccaattgaaatttatcagctgtatacataccactaatacatgcaaaagcagtaaatgcaaaacaccatgctccaattataataccaacagttctgttttttacaaattgatattctggcttgaatttttctcctgcttttttcaatgcaatataagcagcaaatacccataaataacgaagtggcatacacacggcatttaattttactagccatttcactagctcgtctacgtttccaataccaaaggctggaactattattaaaattgaaacaattattaaaattaatttatgaccatttttatatgtgccatatttattttttacaaacattttttcaggaataaaattcttatccgcactatcaagtaacatacgtaaaggtgcatcaatagatatgattaataccgcaaactgtccaatcatgttagtaatagcataaacgacaacaaataaattacctagatgatagtattctcccaacttctggaaggcatagtatgctccatttgtcattaagtctttaggaacattattggaatcaaacatcattccaagagaaattgttcccaaaattgcacatacagctaccataacagctaatgcaatcataccctttgaaaatcccttttcaggatcatccatttcgtttacatacggcgaaatcttttcacaaccgccaactgcaaaaattaatatagatagacctgtaaaaaacttcatatcaaatgcgggcataaacgtttttatagaccaatctatagaatttaaatgcgcattagtaatagcaggtgcagctaccattaaaacaataaacaaaattgacattacaaacatcgatgttcctgcaagtgtagctaatttttttaacggatttaatcctttagaagctatataaagtccaaccaaaaaaattactaaacatgttatttgtagtaactttgtatccatactgctaattcttttatcttgaaatatagcccaacttgttgctatcataaagtttgatggtttttgtgaaatataaggcatatgaacaatccaatatgtccatcctgcataataggcaactctaggacttattgtttcatttatccatgaactgacaccaccaccaaattctttaaacgctgatcctaactctcctaccattaatgcgtatggtacaaaataaatagcaaaaatcaggatccaagatactactgacttaagtccattatattcagagaaaccattgataacgttaccaaaaccccaaactgttgaaaaagccataaatgctaaggtataccaaacaatttttttgttgtttttttcagacataaacttttctctcccacttatattattttaatttttatattaaaataatataatatacttttacctttgtatacatcttcgacaaaattagccttcatttaattatattactaactcaattaaaatatacaaataatttcactttaactttattaaattaacacatatattacttctttttttaataaaaataacaagatttcggctactacattgaacgtcatatttcccatttatcacctagccaattacagttcacctggacattaaacttaaaaatattccgatccaaataaaagaattataaaatcagtcttactttggccttttataaatttcttaaagaaaaacacttcactcataaaaactatcctaaaataattgtatatgaataaagcgctttacaattttctaattattattcagtaatatactgaattgttttaatccataaattattttttctacttcttctggatctgtattttttatagaatttagtataagatttgatataaactcttttttcattttgcaaatatcattgtttttcctaaattccgctgaaattgacaatcttacaattctacgattttcctttggtatttctcttgtaacaactccctgttttgcaagacgatcaactattcctgaaactgtacttttagttaatcctatctgatcacttaattcatttagagttatcgatggcatcatatataaatgaaatataacatttaattgaggtgctgtaaatccgcaatcttttgcaattttttcaaacttacagcttaattcttttctaatattcctaaataccccaataatctcatccgcttgtttttgatgtaattcattattcggcgatgagggcccctcctgtagattcatttttttcaccttctttattttcttttttaggctctttctttccacccataaataaagctaagaatatagtcacgaatactataacaacagttactacaactgaatatgacatagcatctacatacgcttgaccttgaattattttcactatataagatactgcagaagctctagcagtatttgtatccattcccattcccataaatgctttagttaatgtacttattgtgctattagaagttggattatatacattaatttgttcagataactttgcataattataatcatttcttccttgtataagagtagacattaaagtaacgctaactgaaccagccacctgccttaaggtatttgaaagagctgatgctctactaattaaatgtgctggaacaacgttcatcccggtagtactaatcggcatcatactcaatcctattccaatggaccttatacaattaacaagtatgatatagtctttactcgaattcatgtttatagctgttgcaagttcatatgaagcgcctgcaagtattataagtccaggtataaccagtgcttttacgccaactttatttaataaattaccgctaagaggcatcataattcccattaccagagctcccggcaacattattaatccggcttccataggtgtatatcctcttatattctgtaaaaataatggtaatacgtaaacaccgcccatcatagctagagttaatacactagttataatttggctaattgtaaaatcaaataatttaaaaactcttaaatctaataatggatctggatgagttaattcatttactataaataatacaagacttaaacatccaagggtcatcaaaattggattttcaagttttgaccaatcaattgatgaaccttcacctagaacatatagtatacttactagccctacagtggaagataagaatccaattatatcaaaggatttaaaaggtttcctttctgtcccctttaataaaattaaggccaatattactcctactatccctactgggacattaacattgaaaataagtctccagtccatcttctcaataatatatccacccaaagtaggtcctattgcaggtgctgccatcgcagctattccccaaaatccaagtgctaatccaatcttttctcgaggaaatatttgatatattattgacattcctactggcattatcattcctcctccaatggcttggaggacacgaaatgctatcatacttgtattgctccaagaaagaccacataacatagatccaactgtaaacatcgctaaagcaaatacatatattcttttagctcctaaaatttcttgtaaatatccagtaagtggtataatagcaccaagcgccaatgtataagctgttaacacccactttatatcatctaaagatactccaaaaacagccatcattttaggaagagcaatatttactatactactatcaagtatagacatgaaagtacctataataactacagctaacgctaaccaactacttgctaatgattcgttattattctctcccattatatcacctcatcatttaatatgaatcttaataactgcattagttcctggaagaatcttatcatcaaaattatcaagttcaatttttattggtactctttgaactactttagtaaaggttccgcttgttgatgatggtaatagtgatatagcagaattagatatttcacctattgtttttacttttccactaaatttttgtgaatcatattcatcaatagtaatatcaacttgttgtccaacttttactttttcaagttttgtttcttctatgttagcagaaatataaagcttagttggatctactaacgtaattaaagtttgacctgttgataaaagttctccaacagttccctgcttctttactataattccatcaataggtgctcttactaaagattgttctacacttgtgtctggaagattattcatttcttgacgcgctagtatttcattttttgttactttatctccttcatcaacattaagctctagtagtttaccagaaatttgtggagttacactaacaaaatctgcattaactcttgcatcttcagttgaaacatagtatgcattttcataccaatagtagaatcctatactacctaatgctaccacaattaccaacaatattccaataattaatattttacgctttcctttcatattcaagtcaccccttcccttattcctttaatccaatttcagcaaacatgccaggctttaattgtgaatttgggtctgctaaactaactttaaccaaaatatttctactttgcgaatttagttttgaatttattacagttatctttccgtcaaattcaacattatctacttctgatactttaactaccacatcttgtccttcttgaagctgacctgcaatatctaaaggtgcatatgcatttaccactaaagcatccggattagatattgaaacaagagttgcacctggagatgccatctcacctacattaatacttttagcatttactacacccgaaatcggcgctgtaagagttccattatttaatgttgtttgtgcagtttttaaagcagcttctgcttgtgccacttgagctttataaacatctatacttgtttgtgttgctccattattaagcatgttcaattgctcttgtgcagatttctgttgtgactctgcagttgtaagctgttgatgtgcagcttcaagttgctgctgagtatttgctcccgcatcaactaaagctttagtacgatcatagtttttcttagcaacatcataagcttcatttgcactatctaaagttgcttgagcttgagatatttgttctggacgtgtagaattcatagcgttagttaacgtcgcatttgcagtatcaaccgctgcctgtgcttgattcacttgcgcttgcaagtcttgagtatctaacttaactatagtatcccctgcatttacttttgacccaacatcaactagtacttctgaaactcttgctgaaatttttgaggctatatttgcttgatcatttgcttctatttttccagccattatgtatttatttttagcttgctctgcagtagtttcagcagtttttgaattattgcttgtatttccgttattagtcgaaccgcaaccacttaacattagtgctacaactaaacaaactaacatagtctttttcatattaaccctccatgtacgaattatttttatgcatattgttcgcatactaacagtatgtattatacagcagattgtccttgttatcaagaatattattccatgaatttatacatttttttcgaaatcgtatacaccttttgcaaaaattccttgctctttttcatgtattttaaatataaatatattttatatcaaaaaagtcatgcatatatattttgcatgactttaatattctcttatatttgggataaatttatattcaataatctattcaggtatttccaaatagaaagtcaccccttcttccacatttttcactttagtaattccaccatgaagttgtgcaatcaatctcactaatgacaggcctataccatgacctccatactttctagatctcgacctgtccactttatagcatacatcccaaagtttatccatttcttcctcacatatgttatcaccagtattgaaaacacctatctttattttattttcttctttcttgcctattatattaataatttttctgtctttcacatgatcgatggcattcgtaatgaaattatttatagccttctcaagcaggtctctatcagcatgtatttcacaatctttcacacaatctaaagtgaaagtaatatttctctcaccaactactggtttaaatcgttctacaattttgcataaaaatttgttaatatcaaatgatacaacatttagtttaatcattccaccttccatcatagaataatgtaaaagttctttaaccaagctatccattctatcgcattcttcaactaatatcgaacaatatttatccattgtttccctatcattggccactccaaatttgagcccttccgcataccctttaattatcccaattggtgtctttaattcgtgagacatattccttacaagttctttcttacgctccacatcttgtttaagttcatctatacttttgttaagcttgtcagaaatcttatttatactatttcctagccttcctatttcatccttcgaatctatatcaacaaccttgtcaaatttaagattagatatattttcagcaattttactcatttctataattggctttgttattttattagagaaaataataataaatatagcaccaataaacattactataagtcctgccaatatataaaattgatttgcaattactacgctctcatgaatactcttaaaagacttctttagaataataaaatctccattctcaatttgtgaaacaaatactaattttgtcctttgatcattatttttctcatcaatatagtaaacatactttttcgaaagtcttttttcattttctataatagtttgcttaatctccttggatagacgtttttcttcatcatttgatttaggatgaatagaattgtattttatatcataattattatcaacaattattgtattaatgttatcaacactttgtattgtgtctacatattgataattgtctttttctccttccatatattcatccttaattttctgacttactgacactaagactcctttatttttataaatataatatgattctaggaaaactgaatttaaaattatcccacctaaaactaatgaaatcataagaaccataaatatataaaataattttgtcttaattgttttcatatttttctacctcaaacatgtatccacttcctcttatagtttttatccaatctccttgttccgaaagtttagcccttaaagtttttatatgcgtatctatagttcttatatcaccatcaaaattatatccccatactttatccaatatctgctctctgcttagaactgtattaatatttccaactaaatacagtaaaagattatattcttttggatttaatttgatttcttcatcatcaatcactactttatgagttctttgatatatccttaagtttcctacagctatttcgtctgagaatttcttctttactttctttacgatgttattcaagcgtgcaacaaatatttcataactaaacggttttccaatgtaatcatccgcaccttttttaagccctaacacttcatgtttttcatctcctaatgctgtcagcataattattggcacttcagatttttctcttatctctttaagaacctcccacccatcgtaaactggcatcattacatctaatatgaccaaatcaatatcattattattaaaaaacatattaatagcttcttccccatcacacgcttctataggcatgtacccttcctttcttactatatcacatactaaatcacgaaatatattgtcatcttcagctataagaatttttatatccataatatacaccttctctaatgttaaaattaaaagcaggttcaagatttttaatctataaacctgcttttatattagcataactttacttatttatactatttcaatagtattacaattttattaacaaatataaattaaatagtacattattcagtatatactataattggagttcccggctcaatattttcaaatattgtttttgctaaattataaggtgaatttacgcatccatgtgaaccgcttgttaaatatatctgcttaccaaacactccatttctccaactagcatcatgaatacctacatttccattaaaaggcatccaataatcaaccggtgaactataatcttcaccctttaatgttgcatttttctctttgtaatttaaaacatatgtccctgctggtgtccctgtattattgcttacatttcctgtaacaacatcatcatcaacaactagagccccatttttataaaaccatacatgctgtttagtaagattgacttctacataagtattccctatatcgttagttccttttacaaatgcattttgtgcatattttggttcctttgttacatcttgtccattccttataatttctattaaatcttttacttctttagagttatcaacaatccatccataattaccgccactcacttgtactgttttttttgttgctgtaacaaaatctcttgtgctaccaaaagtattataaatgctagatattttatatacataattccgaactttatcttcattgattgtaacttgcatattgtcatctactccaagccagttatgtatagtagatccatccaaaacttcttttttgccatttgaatcatacgtaatttttaatcctatgtatttattaagtgtatctcttgctgcagttacttcatctgactttgaagtgtatttaggattttcataacaattgcttgaatctaaatctattgatgttttcccatcaaggatcgcattagctacattatcatgtaaagcatctttatttatcttatttcctaaaacttcatctactatctcgtattctccatctttataatttaagctagcattttgtggttgggttatcttcttgttactaacacaagaaagcttatttagtgtttggtttagttgttcttcatcatacataattatctgggatgcttcagaattatttttcttaaaaaatgtactaggccaagcaaatgaactttgattcttctttaattctttgattttatcagaattatattttaatccaatatcactagctttaatttgttcttttacatctcctctttcgtctaattccaatgcatatgattgcatttgggcagctagcttttcttctgctccctcaacggtctgcccgccaacattaaccccatcaattacggttccaaagtgaaaatgattaatagaatataatgacatacctaaatatatagcacccaaagtacagagagaaattataacccctggcataaccttgttactacttttatttcttctttttctcattatatctactcccttcgctactattatactaaaaaatctaaattattaatatataatttttcaccaaaaaaagccaccataaatagaaaatgcatttctatttaaaggtagctcactctcacatacttttacagtactctgctaatttatttgcagctttcattgcagtacttacagaaccttctatccatccatgcgtcaaagaaacatgttctcctgcaaaatatactctattattatattctggttttaccatcgcattagaaaaaagtttttgctgctgaggcataaagtagcaaaatgctccataaaatcctttttctctatcccagtcaacagttttatgatcttcaactacataatcaagatatcctcgtggaagaccctggacatcctcaacttgccttttaatcaattcaaatcgtgcattatcatctaagcttcctacgcgtattccgtctaaccctaaattatatgacgctatcagaactccttgattatccttagcacttctttttcttccaacagaaacattcatcttattttttgttactccaccataactagtactaatactatgactaggataccatatggtttgaattggcaaatcagtattagatcctccgccaactatcttctcattatcatttcctttttcccaaaaacgttcattacacataaaaagagttttttgagatgatgtataaaaaacttctcttattgactgcattttttcattgctaaacataggaaatacattcacatccctaagacttgaaaaaggtattgcacaaacaacgaagtcgaaagtttgactataaagcttagatgacttctcttcctcgtattctaacactactttatcctctatatcattaattttatataaactttttactgtctttccactttcccaagatactttccccaaatcttcatctctaatattattatattcctttggtttttcagacattaacgaatcataaaacgctagtggtaaatttactgctccaccaacaatttcgtacctatatgcataatctacagtatattcctcaattaaattttcagagtaactattgtaatagaatgaaccaagaaaaggcgcaactcccgaaattagctctattgctccttcacttacacccatcttttcaagtacttcccttattccaagactaccaacatatttaattatatctgaataattttcttttacctctaataattcctttcttacagaaggaggtatttttaataaattacttgacaatgcatctccaattattttctgccatggagtatttctttccctctcagtcaagttaaattccgggtatatattttccattacacttttaccttgaggatcattcctcgcacgtttatgtcttatataaaataatgcatttttattattttgaataaatggccttgtttttataccaaaagtattaatataatgccatgttgtttcatgacctactggtgtacgcatagcaccaaattcaccataaagtcttttctcctcatcaaaataataggtatagacccgacctccaattcgcttctcttctgtttcaaaaatagtaatatcaaaacctagttttctaagttcaaaggctgaggctaaacctgcaatacctcctcctattatcccaaccttaatgcctgagcaacttccaggcggtaaaattgttgtaatatcttgcggtggacttaataattcaactatattattaaaatcttcaatacgattcgcttgctctaaagttatccttaacatttcatgcctttcttcatcagttggattatctggttgaataaaatttatttctctaggcaaataaagccactcctttaaacaaaatcactatagttaaatatattattctagcagctgcaaaagaccagctaaaagctagtctcatttttaatcttagtctattaagttctaaattgatgattttatagaaatttaataataacaaaccacaggcgttccctcattaatattattaaatatagtattagctagataatatggagaatttacgcatccatgagaaccatttgtcaaataaattcttcctccaaatactgatctccaacttgcatcatgaatgcctattcctccattaaagggcatccaaaaattaactgggctgctatatccctgaccttttaaagtagcatctctttgcttgtattttaatgaatataccccagtaggtgttgacgtattattgcttacatttcctgtaaccacatctccctctactattaaagaaccattcttataaaaccatacgtgctgcttgctcatatttacttctacataagtattgccaatgtcattactcccaggagacattgctgattgtgtatatttaggctcttttcttacagattgtccctcttttatacttgaaattaattctttttcctcatcattattattaattaaccaaccgtaatctcctccgctaacttgcacagtggcacctagcgatgtaacaaaatttcttgtcttaccaactgtattgtaattattcaatatgctgtttagatattctttgatttttggttcatcaagtgtaatttctaaactattatttacgttaatccatttgtttattatagatccatctattacttcggtcttatcaccaaaattatatgttattttagaggatacatatttattaagggtatctttagtattaataacctcctgagattttgaagtatattgaggcttttcataacaatcctcagaatccaaatctaatgttgttttcccattaagaattgcattcacaatactatcatgtagagccatcttatcaattttattaccatatacctcatcagtaattttatatccatcatctgtatattcaaaactagggttttgtggttcatttacgttattactattaaaacatgaaagattatcaatgcttttttttagtaactcatcatcataagtaactacatttgttatcgtagaatcattggttcccaataatgacataagccaattaaatggattttgcttatcttttagttcctgaacttttccatctggattatacttaagatttatctcatttcctttaacttgttcttcattatttcctctttcctttaatttcaaagtataatttgttatttcgtttggcatttcttcatctacttcgtgtacagtcttacccgaaacattaatacaattaaccgtagaaccgaaataaaagtggttcataaaatagattgccagccccaaatatatggcaagtaaagtaaaacatgaaactataatgcctattaaaagttttttgtgtttatttttctgcatttccataataacgtctcaccccgttatcattatacaaatgtatagaataaataatgtatgctttatttacccatttatttttaaacaagttcattcttttacaaaacatcctatattatcttactaggtaatgcctaatactcaatatacataaatttatttacaaattatctcatactttataagacctcaaaaaattatatttactattctttatttctctttttaaaatttctatacctttctaacacgtctatgttctcagcaaagaacatatttagcatatctatattattaatagtttcgctgctaataatatgctcaatcaattctgtttcttctaaaatatcctgtttacactccaaatattccaaaaacttctttactacattatgcctttcaagcaaatacttacctatatttgttccttcctcagtaagaattattactccgtacctttcatattttataagagataattctccaaactttttcatcattctagatgctgatgaatcgcgaacattcagcatttgtgctattttgtttagcctaactactttttcttccatgctgcatctatagatcatttctaaataatcttccattgaaggagtaagcaattttcttgtcaaatttatattttcatatcctcttgcagtatgaaaattcttttccatatttctcaccatccaattttactatatttggggtatttttatcttaccaacagttatgtctaaattattatacatatgttagcctagaaaaaagttttctctaaacttaaacttactaataatatacaaaaagtcaaattaatatgaatattaatttttttacttgtttaattaggtttatagttattgtgttttaggttgacattaatgttaataaaattacaacctttaatatgatctaaatatttaagacgcatatttcagggtatatagctaaactcaaaaaaattaggaatgttataatttaaaatattaaatcataacattcctaatatataattatatttaactttctgaaacttcagccgattttatatgatcgatatatttttctccccaaatagatatgctatccaacaccaatttaaattcttttcctatctcagttaataaatactcaactttgggcggtacctggggaaaaatcttacgatttaccaacccatactcctctaaactacgaagctgttttgttaatgtagcttgctttagttcaggcaataatctttgcaattctccaaaacgaagtgtttttgtacttaaattatgtaaaattactattgcccatttacctgcaataattttttgtgctgttacaaacggacatttgccaaataaattatattcttcctccatcatgtactccctttagtatatttatgatactatgtatttaaaataatcctacttgaaaaaatcacggtaataacctatattatgttcaaagagattataacatattaaaatttaaggagcaattaagatgaatgaagtattagaatttttacttaacaaccctaccttctatattgcaactatggatggtgatcaaccaagagtacgaccttttggtgcagtaatgaaatataatgacaaattatattttgcaacaaataacactaaatctgtttttgaacagttagttgcaaatcctaaggttgaaatatccacgacttctcctgaaggtgaatggattcgtttaactggaaaagcagtttttgattccagtacagaagtaaaatcagctatgttagaatcagttccatccttgaaaaaaatgtatagcttttaattttatgattgccaaaatacctaactaatctcaatataccctaattatatttcacaagtatacgttgatatttctattaatccttctgcgaattcatattttaatgttcacttttatcataatgaacatgtagtaattctttcgtcctattctttagcaatccttcatataaagatttaaccaccagattttcttcgcttcttttaatttgcgtaaccttatctatcttatatagtccctttgccctttcatttttctcttccattaatccaaaaggttgccccgcaccagctatacatcctccaggacatgccataacttctataaagtcaaaatgttcttccccactcttaattttttcaattaaatcttctgcatttctaagtccactaacaataccgattctaatggattcatctttaacttgaagttcacatgtttttactcctttcatacctcgaacacctataaattctatgtcctttaatactcttgaagatttatctttaacaacttcacggataacagcttccgttactcctcccgtaacaccaaatattactcctgcgcctgagtaaagagatagtggtatatctgatgcttctgcctcaatttcatcaaactgtattccaatttcttttatcattgcacatagttccgctgtagtaattacataatcaacatccggaatattatcccttataaattcttctctagccgcctctgcttttttagctgtgcatggcataactgctacagatattgtttctctattctctaaagaatctttttctttgaaatacgccttaacaacagagccaaacatctccattggtgatttacaactagatacatacggcaataattcagtgtatttattttctacatatcttacccatgctggacaacaagaagtaaataatggaaatttattatcatcagactctaacttctttaagaattcttttgattcttcaattaccgttaaatcagcacttaaagaagtatcataaatattttcaaaacccaattttctcatagccgcaacaattttccccataacattttcaccaggttttataccgaattcttcacctaaagcaactcgcactgcaggagcaacttgtgctataactctctgcttatggttatatattgctttccaaacatttttaatatcacttttgacaactattgctcctgtaggacatacagttgcacattgtccacaattcacacaatctgtctctgcaagactttttccaaatgccgggcttactaccatattagaacctctattagcaaaatcaattgctcctacactctgtatttcattacacatcctaacacaatctccacataaaatgcatttattaggatctctaatgattgatttagatgatgtatctaaatctttttttccctcaatgcttttaaatctaatatttgttaaaccaaaacgtgatgctaatttttggagcttacattttccattcttttcacatatagtgcagtctctacaatgtgttgcaagtagcaattctaaaattaccttacgatacttttgaagctttggtgtattagttctaattgacatcatatcttttggtggcgtagaacaagatgttaaaatgctacctctttcatcctcgaccacacacattctgcatgccccataaactgataaatctgtatagtaacaaagagtaggtaaatcaattcctgcttttctaactaaatctaagatattcttttctttatcaaattctatcctattgccatcaatcaccatatattttgacatagtttcttaccatcctttctgtaatttataaatttcatatgatatataatgagaagagataatattatagaagaaatatttaaattactctaatcgccttaaatacgcagccttcaatgcaattaccacatttaatgcattttgacttatcaatgacatatggtttctttatttctcctgtaatagcttctacaggacatcccttagcacactttgaacagcctctgcatttctccttatcaatctcatatgaaattagtgacttgcatacaccccctgaacacttcttatctacaacatgttctatatattcatctctaaaataccttaatgtgcttctaactggaaatgctgcgctctttccaagcccacaaagcgccgtatcagaaatagtctctgctaattcttctaatgtatcaatatcatccaaggtccctttaccctctactatatcattaagtatttctaacattcttctagtaccttctctacatggtatacatttaccgcaggattcattttgagtaaaattcataaagaaacgtgccatttcaaccatacaatttttatcattcataacgactaggcctccactcccaatcattgcacctactttctttaacgaatcaaaatccaaagttaaatcaagatgattttcacgaaggcatagacaacctccagacggtccaccaatttggactgccttaaattctccaccttttactcctcctccaatatcaaatatgatctttctcaatgttgtccccataggaacttctattaatcctgtattattaacatttcccgtaagagcaaatgctttagttccataattattttcagttcccatagttttataccaatgtacccctttgttaattattggggatacattacaaaatgtttctacattattcagtactgttggtttaccaaacaagccttgttctacagttcttggaggcttaactctaggcatacctcgatttccctcaatcgaagctgtcagtgcactaccttccccacatacaaatgctcctgctccctgattaatctgaatatgaaaatcaaaacctgaatttaatatattatcacccaaaagtcctttttccatagcttgttcaatagctatgcgcaatctttttactgcaagaggatattctgcacgaacatatatatatccattgtgtgcttttgttgcaattcctgcaataatcatcccctcaataacaccgtgtggatttccttccatcatgcttctatccataaatgctccaggatcaccttcatcaccattacatacaatgtatttttctgattctgtctgctttaatacctgatcccatttctttcctgtgggaaatcctccgcctccgcgccctcttaaatgcgcctcagacatttcattaataatttcttcagaagtcatgtcaaaaagagccttcgtagtagcactatagccgccttctgctaaatattcttcaatagactccgcattaatatgaccacaattatttaaggctacacgagtttgctttttataaaacggaatatcttcttgcttactataaagcttatctccatccttataacttaaaccagtaactacttcattcccaataatacttttttcaataatttcttcgcaatcatctatacttacctttatatatagccatccctctggttcaattcgtattaaaggtcccatttcacaaaatccatgacatccactctttttcaaacctatagtgttgtcatgtggttcttcctttaattctaatgtaacctctaatcccttttcttttattatctccttaaatcttctataaatgtttagtgatccacctgctacacatccagtacctgcacatactaatatttgcttacgttgtctaactaaagcagccttatattttgaacttatatcattcagctcttctcttgtattaattctcatttgacaactcctcctttaactgcttcactagctttcttgctttctctggtgtcattgacggatatactacatcgtttacagtgcagactggagctagtccacatgctcctagacacgatactgtttctactgtaaaatgcatatcatcggttgtaagttttttctctgaaagtcctaattcactcttaaactcactaagaataggatctgatttccttacgtgacaggcagttccatcacaaattctaatcacgtattttcctttcggttctaaagagaaattttcataaaatgttgctactccatatactttagcttcactaatcttaagttcttttgctatatagcataacgcctcttctggcaggtaccggtattccttctgaatttcctgcataatagtaataatttgtgtcttgtcataattgttagaaattaaaatatcatctagtttttttatttccttttgatttaccatgatcatccaccctcctattatatataattaggtaccttttatatcaagaccactatgagtcaagatttctcttattagtatctattattctacatgtaatcattttctcctttgttttaacattgattacataaataactcactatgtaaaataatgtatgttacttcacaattatttatccatatatttttttgcaaaaagaacatataaaatattaaaaactcctaattaaacaggtagaaaatagtataaaaaccactgtatatataaattctaacattagtggttctttttttatttctatctattaactaaaatatattttgtaagaatacttaaattagtttataatcaatagcgattaaagatactaaacatagtttttaatataaataataattgtgaggtgtaggcaaatgcaaaagatacttaggcctgtatatgcagaaatagatttagatgcaatagcttataatataaaaaatataaagaagttagtgaaagataaagagataatcgcagtcgttaaagcggattgttatggtcatggagctttagatgtggttccaactttacttgaaaatggtgcatcaagacttgccgtagcagtactaacagaaggaattgaactcagaaatgataatataaaagcccctattatgatactcggatataccccttcgtatctaaatgaagaattaataaaatatgatcttgaacaaactgtatacgacttagattatgcgaaagaattatcaaaaacagcattaagccttaataaaaaagctaaaattcacatagcgattgatactggaatgggaagaataggatttctaccaactgaaaaagcaatagatgctatttgtaaaatctgttctttagaaggactagaagtaatcggaatatttactcatttttctacttctgatgagaaggataaagaatatactaatgaacaatttgaaaaatttacggatttgctaaagaaactttcaaatcttaatatagaaattcctataaaacacgtctctaatagcggtgcaatcatggacatgccagaaacttacctagatgctgtccgtgctggaatcatactttacggatattatccatcacctgaagtaaaaaaagaaaatctttctttaaagccagcattgacattaaaagcaactataacacgtgttcaagaaatggatgcaggtatgtctataagttatggaagaacttttaatactgagcgaaaaagtttaatagctactataccaataggatatgcagatggttattctagattactagctaaaaatgctaaagtcattataaatggacaatttgctcctattgtcggaagaatatgcatggatcaatgtatgatagatattacagatattaatggtgatataaaagttggtgatgaagttataatccttggtgaacaaaatggactcagatttaatgcagataatttcgcagaaataatgggaacaataaattacgaaatactttgcatgcttaaatatagaatcccgagggtttatgttaaaaacggaaaaatatttaatgtaagaaattatctatagattcaatcaactttacttataaaaataaacttgatatttagttatttctaattagttaataagttataaataagctacttctatgtaagcgcaaataacgatgtatatgtaaatatgcatatacatcgctatttatatttattaataaaatcttatattgctagtttcaatgtttatcctataaacattctggcatactaatttcagagaatatcgcctcaaaatataactttaattgactaccttcctatagatcaaggtttataaagggttccttattgaaaatttgaaatatatcaagcagcgaaattttatattcatatggaacaaatatgtattcaatttcggctgatatccatataagttcaactctcatttcagaaccctatattctatccactttaaatacattaaatattcttatttgcttgaatctgccattactttgtcatatttataagcaggcatttatataataaaaattctatttccttctttaatctaactaattcttcggaacttatatttttcaattcatcctttgtattagtgaattcctcacttaattcatcaaataaaactaatacttcttctttacttatttctttcagttcatctaagtattttcttaaagacccttcaatattattagcccaattatctatagcggttacagatatttcatttatctttttctgccatgtcaacgaatcatataaaaagaatattgaatccgtaaaaacatttaaagattcagtaattccctttaaagatgtagcccttattgtttttaataaatgatttaaattattattaacttctccaacagatgatttttcaaatgtattagaaagcttctttaaatttttactaatagcataatccttttctgaattattgaatttacctttatatactgtcctaaacatttctcctgtagctctttcaatagaatcccctctatgcttttctatgatatcttctacaaccttgttatatgaaggtgtacttcttttaacattctcctttagcttaataatttctgcgtttagaatgttctcaacttctctatctaaattaataacttcatcttcaatataggtatttaagttttcagtttcctcgcttgttaactttggaacatagtagtgctgcattaaggtgaaggtttcttccttcattgaccatttgctttcatcgtatatatagttcgtaatattctctttgattttcatatcggattttcctataagccttactgcttttaattttatttttacaaatccgttttctataacatctagtatctcatcttttttatctaagaattccttaattacattagctttttctactacctcttcttttttacattctatttccgcaattctagaactgatttttatatcgcattcacgcaataagtaatcctgataattctttagagtttctgaaagctctccttctttatctgggtcattaacttttttgtatatatagttccagagcttatctgtgtcaggattcttttcaatactactttcaataagaaatgtttctatatctttatggatacattcacaaacgctgtttctaatttcattgattcttttattatccatatctatattttgtgggcacatatttactgcgagtacaacttccacattattgtttataatttcgctaacatactttaaaaactgaaaatcgtcttctccaactccagttttatacgacacaacatatattataaaatcactttctggtataaaattctttaaaacttcttcgtgcctttcaacaagtgatccatatccaggagtatcgaaaatcctcattccagaatatctcgaatctttacatggtccaatatatcttaatctatttatattaccatcgggttttactgtaaaattcgaaaaactatcatcatccaaaacatctatgcttaaatcattatttatagcaaataaggtttcttcagaactctcgtctattataacttctgtgacaattccagttgttggtttaacactctccactagtattttcctttgaaaaatactgtttattaacgcactttttcctgagctagtttcccctagcatgacaatatagtgagctggattaattattctatcctttattaataaattcttcgatgtaatttcatcattatcaagaatattaactaccttatcaatcctgttttgtctatcaacgcagtttttaaaaatattcataatatttatttctccttatattcctcgattaattcccttaatatttttaaatctttttcaaattctaaaatactttcttcgttataagtagtttcatactgtttttccaagtcttccacatcttgtttaaagacattttctaaattagatttcattgcctttatagattcgtctatttccttttgttttgccattaaatctccagttatttcttcttttaaatatatttctaaatcttctatcattggctccaaatcttttaaagtataattagctctactttcaactatttttttcctcatatgatctccaatcaaagaaaaggctaaacttattcccatcccaaccaaaattcctacaggaccaccaagcattcctactgctccaactgtcccaattactccggttgataccccaagtaatgctggaattgacttttcatattttattgaactctttttattaaagaatgatatattctcataggttccattaaaaccttttattcttatattttcaaatctgctatttatattttttataaattcaccaatactgttcaaaatctcatccattatatcatttatcgctttatcggacgtctctttatatattaagctaagtctattgccatcaactattcctttatttataattcttcttaattctactcgtaaattttcaatgttctcttttattactttagatgaattatctataatattattcatttcatcttctgcataagttcgaaaatctcttaattttcttttattctccgataacattgtttttatctctttgattctttcttccttttctaaagtattttgattgtccttatttaatgctaaagttttataagtatttatcctatcattaatgttttctaaaacttcattaactctttggcttaagaccttcattaaatctttattatattcctttgaaatatttttaatttcttctattacattaactattcctgaattattataagctgcttcatctccagtgaatttcccttttacagcctcataaacatttactatatcaacttttatatctctttcttcattatgagaataacttatactacttaatacgccagagttatgttctcttgcctcatttgcatcttcaacactttcatcattccatttattttgaacaaaaatagtattagctaatttaggccacaaagcatttataaagcttttctccgatcttgtaattggtggatttgtcctaattaaaaatattcctgctgttagcttgtctacatattctaaagtagtcttctgattttgtggggtcaaacttccaacaccaggcaaatctacaagtactatatcatcttttaaaacatcgctcttgttatataatactattttcgatactttaagattattggcttcattataatcattatgtacatatttttccaattcttttatgcgtatatgctcttttcttccgtttagataatatactacagcttcatcagtattttctccatatctaacctcaactggtacgcaagttgtttcatcaacatctgtgggtaatacattttcctccattagtatggcatttaaaaaactactctttcctgcaccttgaatccctaaaacaggaaccattatttctttcttattcaaattctcaataaaatgttcaaagtatctgttataatctataccttgcttatcattattaagatatttttctaataagttagaaaacctttcatcttctattaaatttatatatgtcatttcctattatctccttcttccaaaaagcttagaaaagaatgatttatttccccactctacctcttcttgtatataatcaatcttattattaagctcatcttctaatttacttattaattctattatactatctttatcttcaattttactgtcaatatccttaatttttcctaaaattgaatttttattattaattagattatattctatagatttgtctaaagattcaactttattttcaatagatttttcaaccaagtctactttttcttctatcttatctaagttaatattatctaatttatctaaaatcgcttctttattacttgccgcatcttttactacttttaatcctaatattgccaatctttcttctatagattcaaataataccttactttgctcttccacactcttttgtattactgcttccaatttcgtttctgtcatttctcttatctttaatatgcttttatttaaatcttcaagtttttcttcgaattcttcttcatgaaactcttgaaaattttctcgcaagtcatttatttttctctcaactggctttaatttttcagttagctcttctgtcatatttctagatgctcttgtaagtaaacttaacatatcatcctgtatttcgcccattatattttttgtaacttcatcgctttgaattaaaattgatctttcttccatatattcattcatactccttcctctttagaggtattcaaaaaatagcttaaaatcttttcaatagtttcttgttcttctactcctcttgacaaaggattttcaatcagtttttcttttataactttataatcacttatcaaaaattcatgaatttcctgtgattctattaatgccatattatatattggatttttggaattaattaatatatattcaggccttatactactaaacctgctaataactttatcttttaggtttttaacttctatcagaagctcctctatattatttgcatttataaattctctgcatgaatctattactaaattcactgataaattactattttccttaaagaaatagtttaaatttctgctttctaaaatctgcttcttagaatttccaatttgtattccattaaaaataataaacatactataagtcatatcttttatctgtttaagtttttcataaaatttaagcgtaccttttccagattcatagataatagctatatcttcaaaactatataaaccttctctctttattaattcacattcttcaagatctagatcaattccatacattctagaaatgaaatctctgcaagaatctatatcccatgtccaaaaaagctttaggcccatactgttagacttttcttcacactttttatttatatattttccaactaataggtagttcttttctaaaattttattactcagcatataaaagttataatgtaaccttgaaatactgtatgaaatatttttttcataattatcacttattattgctacctcatttttcacatcaactcttaaattagaaagcttgtctttaatacctattagatccttagttacttctcctatatcataaagctctatattttgctcttttttttcttcaaattcttctgttcttcttgatacttcctcatagaaagtatctattgcttttgtatattgattactccattcttttaatatacttatatatttattcttattttcactacatattttttgggccctcttaatagtctcatctttatcaattattctctcgtcatatcctacttctttatatccccagtccttgtcaaatatattagacaataatcttttccccttatttagaaccccttctttcttaaataacacagttctttcttcatatttatgcttaatctcaatatttttactttcgatactcggcaaaacataagaggatcttatatctaaattaagactatcatatattcttcttttatctttttcacacctcttaacagtgcttaaaatatcactttcaatatataaatttttattgttaattctatctactatgtctaaataatcttcaatattttcagatgatacagatgatatttcctttattatatttgaagtaatgttttcaatttctttaatcttttcagctatttcattctgagcagtctcaaatttatttgcaagattatcaagctctttattacttacttttattaaatcttctatttcacctaaattatttccctttataatttcttgatcagttgaaattatgctattaattttttctattagactttcagctctccgtccattaagctttggaatagtattttccgcacaattttctatagcattaataaagatttcaaaattagaattatcatatctttccttatctttatctacaattcccaaaagtccattaagtgctgatatttgaataacttccgatatttctttatcatctgtaatttccattaagagcctctctgctctctttttatacttttttaatatagtaactttatcttcttcaactattccattcctgccaatcttttcttcaattgaatctatcatgttttgtactaggattatctgcttgtctttctcacttactatcttaattttttcagcattcgttgcatcactattagccttaaccgtagtcacaaatatgcatatatctatagttggaagtaatatctccaatgtcaatttttcatgattttctaagttccatgcatctaatcctggactatcgattatatgtattttctcatctaacataaaataaggtgtttttatatcaatctgagtaacattaagcgtatttccaggattcctgctctcatccgcatattctgctatagcatcttcatttagattttccgtctctaatattttaggtccactatccttaaaataaataacggcttgtctctttagtccttttgatgccgtaattataatacttgaactaggccttatagccattggtaaaatcttttcaccaagaagtgcatttactaaagtagattttccactactagttatccccataatagcaattcgtattatattatcatcataaatactttttcgttcttcaaaccatgctatatccttattgtatctattctctctataattatttttacttaaaactcctcttatctcatcaattatattcaatatgtaattatcttttctcataaaactctccataacaactatactaattcatactatatcttccttatatattttcatagttctgataaggcatatgaaataaaataacaaattcaaaatgccatgattatttttcattaggcaaaaaatggactcgacagatgaacttattgtttttttaattatgcctaaatatatcttatcataattaagcatacttatctaagcaaatacttactgaataataaaaatttcacaattttatttccaaattctacacaataatatgtgttgttgctaaaaaacccctattatatattttaacttgtcagatttattattaattaagaatcacttatattaatttgccaaatataaaaacttgaaagaaatatctaagtattctttcaagttttttataaatgtatatattgcaaaaataatttttcataataattctaaaaatattgtaaggattttagtcgcgattgtgaatttcaatatatatatcaaaatcttcataaaccagaaatttgttctttgttttaattataagtattattctaatttctcaaattttcattaaatatatgtctaaacttttcactattatatttaatttcattaatctgttttatagacattgcccccattatactatttgttataattacctcttctgaatgtgttaaatcatctatagtaatgcttttttcagtcaccttaaattttttcataatcttatctcttattataccttttaataatccatcttcactatttggagtaaaaatttcattattttttatcataaatatatttgcacagctcgtttctgtaacattacctttttcatttaaaaatatcacatcatcgtagcctaatttcttagcattctctttttcaattatgttttctatatagcatgtagatttgatagaggccaatcttgaagtactgttacgtcttacctttgaaattgttaacgacattccttttttataatcgtcatttttatatgcaatttctctttcggttattataatgtttaaaggtgtaacagttatttttaatactttgtcttttatctccaacttatttaaatgatctcttaaaaatttttcttccactaatggctgtaaatttaattccatcatatctttttttaatctctgtaaatgctcttctaaatatattggtttttccttacaaagaattgtttcaaatattcctcttccaaaaaataatccatcgtcaagcattactttatcataattatgaactatccttctcactataatacctccatcaacgctttagctttgtctattgtctctaaccactcctcttcttcaatagattcccatgttattcctccaccaactcctaaatacgctttattaccttttcttataatagttctaataactatattaaaatcactatttcctcttaaatcgaagtatcctatagaccctgtatatatatttctttttagcttctcaagctcctctattatttccattgcgcgtattttaggcgctcctgtaattgatccacccggaaaacactcccttatgcactttactgaagacacattttctcttaatcttccttctattgttgccacaagatgaaatacagtctcatactcctctaacttaaaaagttctgtaacttttactgatttaggtttacaaactttactcagatcatttctttctaaatcaacaatcattaaaagctcggatttatctttttccgaagccattaactcatttctatttctctcatcttcctcataatcttttcctctaggtctagttcctttaatcggccttgtttgaaccttaccatctaaaattgataaaaatctttcaggtgaagaacttattatttgaaaatccttaaaattcatatatgctgaaaatggtgctttatttgtatttctcaattttctatatatttcatatggcttttcattattattacaccatatccttctagtcatattagctatatatacatctccacttcttatatattctttaagagatgctatagcttttttatactcttccttatctaaatttgaaaagaattcattatttgttttttctaaatttactggaagcccctcaatataattctctagacacttttctatattaagtatactatttttagcttcttcaagttgtccaactgaagttatataagtttttttattttgtaaatcaaatattattagattgtcaaagaaaataaaaatgctatctggtatactaaaatcttcctttgattcatctggaagatcctctaacactcttcctatatcataagaaaagtaaccaatagcaccactaacaaaaggaagtttgctattaatactaattttataattctcaataattttatccaatttttcaaatggatctacatcattatattcttcattatcaatagttacttttctccccttagagataaattttttatatggattcaatccaataaaagaatacttggataacaatttgtcttctttcgaactatctaaaaatatagaatcttcactatctttaaaaagatcatatgtataaaaaggattataatatgtatttaactctttaatcttaaaatctaccatttctaaacctcttgcactctaaaataaaattttctaagattttatgcccttcttccgtaagttctgcttctggatggaattgaactccatatataggtaattcattatgtctaattcccatgattaccccatctgacgtttctgccgtaaccaataattcttttgggagtttcttcttatcaataattagagaatgatatcttgttacctttaatggatttttaacattatggaatattccgctattattatgtgttacttcacttattttaccatgcataggcctgtcgcctttaattatttctccgccaaaataatgtcctatacactgatgtccaagacatatgcccaatataggagtttcatttttaaatttatcaataatatctaggcacaagcctgcttgcttgggatttttaggtcctggtgaaataactataccataatatttattgtttctgatgctctcaatattaattttatcatttctaactacatccacaatttctccaatctcttcaaaatatctgaccagattatatacaaacgaatcataattatctatcattagtaacactttaatcattcctttttaactttaattattataactgtatatgttattattaagtttctgcatttctatcttaattgaactcttgttcttgagctactataattttaaatataaatttattatctcaacatatatactattagtcacatatttattttaacattaaataaagctctgttccattggttgtattttctcgttcgtaatttaaaataatatctagtcagtcttactcttcacaataaattacattaagtatcttgtattgctacataagaattacttatatgtataataaataatatataaattttatttattgtacatatattctcttgtcataggaatatcatcatttattcctttagaaattagtaattgatgaatatctatcactccattattaaatattgccgcacatgaacaaagataaagttcccacattcttataaattcttcatcaaacattttagaaacttcacttagattgttattaaaattctctctccaatatagtaaagtcttaacataatgccttctaagattttcaacatcgatagtatggaaattataattactacaaatgtctataatttctctaaaacttggaataaccgcttctttaagaatatactttttaatccatggatctacagaatattcttttaatgaattgatataatccaataaacataacccttttggttttaagacagaatcaatattttttataaatagttcataattctctcttcctatatgctcaaccatgccaacacttacaattctatcaaatgataatccactttcagctaaatttcggtaatccataagtctaacttctagtaatttttcaagctttctttcttttattctttcattaaattttttatattgctctttgcttaatgtaattccaataccatgaatactatatttttctgctgcttcaataagtaaaaatccccacccacatcctacatccaagacgctcatgccttcttttatgtctaactttgctagtatatgattaattttattaatttgtgcgtcatgcaaactatcattatttgatttaaaatatccacatgaatatgtcatagtatcatcgagccataaactatagaaattattccctatatcatagtgctcttgaatctcacctttttgtttttttgaagaattggattgaaaaatcgtattttttactggcttactacctgatgagattttatcaatctgactaataaatatatttataacttcaaataaatctccttttatctctatattccctttcatgtaagcttcaccaatagcaaggaacgtacttctaattaagtctgttttacttatttctcccttaatatttatttcgaatttaggcgtacccttccctataataaattctttattattttgaaacttaatcctatatggtatatcatcaaattttgacaaatatttaacataaagactatttattagattcatatagaattcctttctataatttaaatactgattaatttatactattatataatttcaaatatgctatacattaaattctatattcaatataaataattaaagagacagtcgagaacgcacaataattttacgcttctctaactatctcttaactaacttctcaagtcatttcattttgtataattatctttttcctcattttatttgctaatttttttgttactttctttagtgcatttttacaatcacaacttttaaataatttccctcaggaaatttatctgtaactgcaaaatcttctgaaagagtatgttcttctagaatttcataatttctatgtgattctttaaaagcttcatctataaatttcttaaatttgcccatattaaaagtagcacagtttgttgaagctacaattactccttcatcctctgttatatctatagctgatttaaccaatcctttatagtcttttgctgcactgaatctattatcttttgatgttgcaaagcttggcggatcaagaataaccacatcaaattttaattcttccttttttgcacgtttaaaatataggaaaatgtcttcaacaattatttcatgttttgtgaaatcaatattatttatagtaaagttctcagttgttttttctagacttcggcttgctaaatcaacacttgtagtaatagcaccaccttttgcagctgccattgaaaatgctcctgtatatgaaaaagtatttaaaacttttttattattggagtatttatctttgatagactttcttacttccttttggtctaaaaatactccaaccatagccccatcatttaaataaattgagaaattaactttattttctttaactataagaggttcaggtgcttttcttccacaaacatagctatcttcatctacaaccataccattttcttcaaatctctttttttcatatataccatcaaaagaaactaaactttttatagctttaattatattgtctttaaatgtatatatacctctgctataccaagtgatgagataatattcatcgaaatagtcaatcgtaagcccacctattccatcgccttcaccattaaatactctaaatgcagacgtgtcttttgaatgataaaatttcattcttttggaaaatgcattcctaatcttatcatagaaaaatttataatccaaattgctatttttactgttacttaaaatccatccacagcctttattttgtttcccataatacccctttcctaagaaagtctttttttcatctataagggttatgatttgtccttcctcttttaaatcttttatattatcaaaagcttcttcaagaattaaaggatatccatttttatatttcttaacaaattctttttttactgtaagtattgcttctttcatatatgtatttaccttcccgaaaactattgtattaaattctaaataattataccataaatctaaactagttaattactaatttaaaattgcatattttatcgtgtacactatatattattgtttctttgctccagattagatactgattaatttataccatatataattttaaatatgctatagattaaatgctatatacaatagaaataattaaagagatagtcgtgaacccgcaataattgtacgatccaactatctcttaaataacttctctattcatttcatttttgtctaatattttatacatcaaattacatataatatacttgtttaatctataaactattgaattaaaattctactatagtctcttatagtttcgtttaatttaggtaatataatttgcaattctccattttggaattttgcagaaattcttgatttatcaacgttctcaacatgaaaagtccttgatatttttccataagctctttctcttctaatataattatctttttcttcatttatttcttcatttctaagagcagaaataattaaagtattgtctctgtattcaaggtttatatcttctttcttaacacctggtaattctgcactaactaaatattcattttgagtttctcttatatcagcattaaatttttggttatttccaaaacccaaactcattggtgaaaagaaatcatcattgaaaaatccattgaaaaaatcttcaattgagcctcccttcttgtctaatccgttagttctaaaaggtatcaatccaaacatactaagacctccttaagatatttattatttgtttttacaagtaaattatagctaaaaggtcaaagaaggtcaaaatcagtttttgtcctttattttttttctcttactatatatttctataatattaaattatcttttacttacatagtatttgcttttattttctctaattttttattgcttatatatttttcatgatctctattctttcactttgatttcaaatcatatttagacatcttttcagctatattttgggcttgaagtgataattcttcagttgatgccgcagtttcttgtgccttagctgtgttaatctgtataacttcagagatttcgttaactctcgttgtcattttcattatctcattcgtttgatcttgcgatgctagtgatatttcattgaccaatttagcactattatctacattaaccactatattttgtaatgaattcgaagcctcttttgctaaactttcaccttttttaactgcaaataaagaatttcctattaacatattagtatttttaactgcatttgagcattgttcggctaagctcttaacttcattagctaccaccgcaaatccttttccagtttctccagctctcgcagcctcaatagcagcattaagcgccaaaaggtttgtttgtgatgctatattttctatagagcttgtaatctttgaaatctgattggaagattgagcaatctcctctatagatttcattaactcttccattttgtgatttccttcagatacaatatccttggtactttccgatactttattagcttcctctgcattttgggcgtttatagtaactttagttaatattttattaaaattgtctaaaagtttttctattatacttgcttgatttgttgctccatctgatagttcttttgtaattagtgatatttgttctgatctatttgatgttaactctactgtccttgatataccatagaaatcactattcaatgtgtttataatactctcaagcgactcttgtataggaataaaatcgcatttatattgcacatttttctctaactctatatccaaatttccaactgatattttttctaaaattgttgtaatatcatctacatatgagtctatcatctcaatagcgctaatcaaattacttgccatctcacccatttcatctgtagattcatagctactttcaactttgagatttccatataataattcttcagatatttcttttatattattaattcctttaataaatatatctgtcaacacgccgcttattgttgacgttattattagtgtactgatcattatgattattataaatcctaatattatattgttaattatatctaccttatgtaaaaaattagatgtttgtttttgagactgtttatatacttctataactttatctgctattccatctatttgataagaatatgtattttccattactgataaggctgatatcttctctttcttatttatcaattccactatatcacttctactttttgcggctaattctacagatgaattaatctcatcaattagctcataatcaggtagtgtttcttttaaaattttagaattactatcgaattcttttacttcttcatttactaattctaaatatttttcttctttctccatatcttcctcagctattgctttataaagatttttctctattttttgtaaactaattctcatatttgatatattatctgaaagtgcatatgatttcctatatgacaaattggttttataagaaaacatatataaaatacttactattataatcatgcttattattgtaaacatattgattattaagaatgatttttttattttcttatttattggatctcctgatataagttcatgtaatctttggtacataactgtttcccccccgaataataaaatacatttttcctttttataatcatgattaatttatctttcttgctaattaatcaccgaaattaatgatggtatgagttttaattgaattaatttttcttttcgccatttaattgataatgaatttcatttactattatatcaatttatgtaccaaattcaagacatatatgaaaaaatatgaaatataagtaattctataattttttataacacaaaaaaacctcactataaattttatatctatagagaggtttcccttttactaataattggacatttctattatctgacaacatttcatgtgcttatccaaacacatctatgaatctttaaaacataactattacttttacacaaatattttccctcaacacctagtcttatatatagaataaatttccataaattatgctcttgtatttaattcactcaatactcttttatgttctttttcatctaagttatagaagaatattgcaacaagttcaataattacaaatattactggaattgcagtcattgtgattaaaatgccatgtaatgctgtctcagtttgagcgtgatttgcaacataaccgaatttcgctagtattaatccaggaacaattcctccaatcgccataccaaacttgaagaagaatccaactagcgcataaataacaccacttgcacgtttacctgtcttatattggccataatcgatagtttcaggaattagcgcccatgtgaaggcacctgcagtgatggtacccaatgctgcgattaatcgtcctgcaaatacaagtggaaccattgttgcaggaataacaaataaagctattaatccaattgctttcaaagataaagcagtaaataataattttttcttacccatccatttatacattaatggcattaacggcataagtattagtgcaggtagagttcccattaaaccataccattttactaaatctggtcttgcaacattataagtaacataataaattccaacagaattaactattgagttaacgccaaaattaagaataaagaacatacatatgataactagtggacgatttgactttaactgaataaaaatatctttaacattgatttttgcatcttcagaatgatctatttgaacgcgctctttagtattcaagaagcaaaagattagtagaagtgcacctaaaattcccattattgacatggtaatttgccatcctgtgcttgtttttccagtcatatttgtaaatattccagctaaaagcggtacaccaaaagaaacaattaatcctccggtatttgaaaataacattctgattgaagttaggcttacaacttccttgttatcttgagtaatcgctgaagtaagtgctgcataaggaatgttaactactgaataagttactgataatagtatataagtaacatacgcatatactaatttcataggatctgaaaatgctggagttgtaaaacaaagtatagctactcctgcaaagggaaaagcaccatataagatatatggacgaaatcttccgtattttgtattcgttttatccaccactgtcccaattagtggatccattacagcatcaaacagtcttactattagaaacatgaatccagctgctgcagccgaaattccaaaaacgtctgtatagaagaatagtagatagctacttactgtttgataaataaagttacaagctaaatctcctgtggcataccccaccttttctttcatagtaattttttcagaaatcttagatcttacttgactaatattcatttaaaattcatcctccatttttaatttataatatttttcttcatacacttctataaaattttgtattttctaaatatctatcctccttataatttagtatttatatagtcggttgcgggattccgcaacctttaactagtccaatcttttaaaaatcatatatttacagcttgttttgataaaaacataaaataaatcgtttacctatatctgtttaataagtaattcatattttaataaaactatattaggttttctttatgcataaaataatcaaaatcagcagatttattatttccgctaacatcctgacagtgcatacctacaaatgcccctgtaaagcacgctcctccacctacataatcatctgataattttttagattcaaaacttgtaggtatttccttccattccactccatcaaacgaataaaagaacttatattcctcaaccctaacttctacttttagatgtacgtattcaacattttctggcactgttatcatattttgagctagtggttgtgaaaattcaaagttatcacaagaaataatatcaattactcttcctttttcttcattccaagttacatcaattgttgtccaattttctgtgttatagtagcatacaagacctgctgattgctgaaaagtatctggattgaaggacacacctgttgccgcatcaaaattaaaagattgccaccttctagcgactaaagcctgtgtaaatttagatattaatgattcttttccgtataatctcatatttcctggattttctgttaaggacattatatcctcagtcaatggaatacgtagtgattgaaaattaatgttcaatttatcattgtcgaaatgatctaattccttaaaactaggttcccattttacttctttcatattaggagcatcaatttctattgagccttctttaccacctactacatatggccatccatcaatccactcaagtttttggatagctgtttctcttccaagtggacaatatcctcttggcgctatatgtggaagtggtttcccagtttctttatcatatcctctcacttcagtgccaggaacttcatctgatggaagtggccttcctgttaaatgaactaaataccattcatcagtatgagtgtgtacaatagatgcatgaccacatttttgtaattcatttctaggcttgtcccacgcagtaagaataggattatctgggtgtatttcataaggtccttcaatatttttagaacgtgctattgtagcagcatgttcatattttgttccaccttcagctgttaaaagataataataatcaccaatctgatataagtgaggaccttctgttagtttaagatctgtccccttaaaaatcagtttagattccccaattaatttttcttcttctggagaatattcttgcattacaatacctgcaaatctatggttatataccctattatcaaacagcatattcaataaatattttttcccatttttatcatggaataaagaagggtcaaaacctgaaccatttaacttaactggttcactccaatctccatcaatagtttcacaagtaactaaatagttgtagcaatctttccaaattccttttgtaacttttacatctgtatatattagccaaaatttattgtcactatagcttaaacatggagcccatataccaccagaatcagcatttcctttcatgtcaagttgtgaaattctatttagagggtgagcaactagattccaattaattaaatctttagaatgataaatttgcactccaggaaaccattcaaaagtggatactgcaatataatagtcctcacctaccctacaaatactcgggtctggattaaatcctcttaatattggatttttaattttcatcattaacttctctcctttaactaataaaatatttattatatttttgcctaaatcataataattaataaacttctattcttaactttcctttataaacttcagacattttatgctaaattaatttcttatcaataatcgtttacaaaatgcttattattatataattactctaaataagcgcctttcattgctgatacagctccccttgtataacgtccaaatatcccttttcttggtcctgttttagggagactccaatttgcttttcgttcttctaatattttttctatctcctccaatttatatgattttccattgattccaacaatatttagctttctctcatttatatcaagctcaattaaatctccatcttttactaacgcgattggccctccggttgctgcttcaggcgatatatgtccaacacatggtcctcttgtagctcctgaaaagcgcccatctgttaataaaactgttgatccatttaatctgctatcacatactatggcctctgttgtcataagcatctctggcatcccagatccccttggcccctcatagcgtataatcaagacttctcctggattaatcttatcttcaattacagcattatgacaatcttcttcacaatcaaatactcttgcagctcccacatgatacatcatattttctgatactgctgcatatttgataactgcaccttctggagctaaatttcctttcagaactgcaatagatcccatttcctttgttgtctcaactggttttattaactgatcccgatttaatccataattatgaagatatccttctattctgtcaaagaaaccatcattttttatatcctcaagattttctcttagggtcttacctgttactgttagtacatccagatttaaataatcctttaataaccactgtaccataggaatacctccagcaaaccaaaaggcttcagttgggtactctccactaggatatatgtttcctatgtgtggaatcttatgattaatctcatcgaatagttcaggttttaattctatgccaatttcataagctatagcaggaaggtgcaacattacattagttgatccacctatagccgcatgtacaacaattgcattgtaaaatgcttcttgagtaagtatatcctttgttgtaatatttgccttaaccaaattcataatttgccttccagcttttctggacattgctgttatatctctcattgtagcaggcgcaagtgcacttcctggcaacgctaaacctagtgcttcagccatacattgcatggtgcttgcagtaccaagaaactggcaagctcctacagatggacagccagtcaatttaaaatctcggacttcttgatcagttatagcaccttttttcttttctcttaaagaaatatctccagccttaatagatgtagacatatatggagctggtctcatgcttccaccaggaacaaatatagttggtatatccatacgtgcagccgctttaagatgcgcaggaattgatttatcgcacgaagaaattaaaaccattccatcccatgaaacaaatgatccatgaatttctaccatatccgcaataacttcccttgaagctaatacaaaattcattccatcatgtccttgagcacatccatcacaaatatctgtaacgtgaaattgtcctggacgtcctcctttttcatacacaccaatacttacttgatgcgttaatcccataagatgagaacttcctggatgactatctccaaatacatcatcaataagtatttgtggcttttttatatcttcttcatcccaatccattcccatttgaagagaatcaaattgtgaccaaagcttacgctctggaatactttttggtgttatagaattctctaacattagtaatctcctttcaataatttattactttaaatatttaatatagtctagacataatcatctatttatttctcaataatttcttgtattttcttttttatatcatcgtttattttaatattataatttctaatagatgtattcatatctaactttaaagatatattaactgcttcttttagtcctactataaatggatttgtcaaatcatacaattcagtcaatctatttattttatcttggagtataaataatttttcaaagtctttatttagaacagctttatacgtatctacaaataattttgcatttacattagttaatccacctataataccatctcctccagataataagttaggtattaagtattcatcaaatccagaaattacacagaagtctttacgaactttctttactttttggacgaaccttctaatattgctaatagaatctgtagtatctttaatgccaacaatattattaaattcatttgctaatcttaacactaattcatatgatacgtttatagatgtcctagcaggaaaattataaattataataggtaattccgtattcttcgctattattgaataatattcgtatatataattttcatctaaaccaaaaaaatatggagttataatcaaagcagcatctgcttttgcatcactagcacatttatttaattcgataacttcttctatattgttatccccagttccaactattaattttgttctcccatttataactttagatacaaacttaatataatcttttttttcttctaaagaagaaaaattaaaaaattctccaattgatcctaatatgacaatcccatttacttcgtcttttattaatttctcaatcaaaatctctaaacttttcttatcaatcttcccttcttcattgaaaatagtcactattggtgtataaattcctttaaacataaagcctccttgtgttccatatttgaaacaccattctatatattgattatttttttgagatgattgataaaatcatctcaaaaattaaaataaactttcttttttatatcctaatttttttgaaatatccagtgcaactttagttataagttctgcacacactccaatacgctcatcattaattttcatctttaacgtagaaatagatactgctgctattgcttgacccatcctattatatataggcacagctatacaaaataatccttcctcattttcctcatcagaaatagagtatcctctttctctaattaaatctaagttttccattaaggattctttattcgttattgtacccttagttttaggaataaatataatctgttcaaaataattgtttaactgcgcactattataagttgctaaaatagccttacctaaacttgttgaatacattgatgttctagatcccaaattaccagttgttcttagagtaccttttgattcatgcttatctaaatatacaagttcattatcatttactactgctaaaaacactgtttctccaatatcattagacaacttttccaaaaaagcactagatatcttagttaattccatcttatttaaatataagcttccaagttcaaagactcctacccctaattcataactcttcaatttcatgttttctattgatagaaacttttcacttaccaatgcattaactatattaaatacactggttttaggtatattaagatatttacttatttcagcaattgttacgggttcatcactttgcccaacaaaccttaaaatttctattcctcttagaatcgctgtgttcaaaaagctcacctcactgttccatatataaaacactattccaattatcgtatttattatatattgtgctattctttctgtcaatcgtataattgaataaaattaatattttattcaattaattcttttctaatatattctctaattttaaatctaaatattcttatttcattgctttaaacatacatgttttagttgttattgatatatctccatttttcttaatatattcttctaaatatttcgtaaattcttttttcttttcaccaacaagtattgaacttccttgaatagttgaggctttatatgatactactggttcagcattatctactattattttaccatctaaaatttcaacatctactttatgaaaatatttttcaagcattcctctaccatgttctaggtcaaatctttctgaatacccattgttatctagcccggaattagaagcaaagttttctgcaagtctatttaattccttcatagaatcacaagaattagctgtcacataaaatacaccattaggctttagtactctttgtatctcagctaaagccttttctatatctggaacaaaataaatcatatgttgagcgatgattatatcaaaagtttcatcattataaggtatttcttcagcattaatttcttcataatgaaaatcatgatatacctctttcaatctatttcttgcgattctaatcatacttctagaaaaatcagatattgtaatatttaaagtattctctatataatctttattcttaaaccaaagctttcctgttccacatccaagttccaatacatttgcgtttagtgagaaatttatttgattaaaacaccacttatcaaagtctattttatttacattatagctatgaagattactcctaatatttaagttcttatctgttttatattgttccctaaccctactttccatattagttacttttataatatcaatcaaattatttgcatctagaaaaccatttttctttgctgtattttgtgctttattaaaaacatcaattacagcatcaatatgtttcttcttttcttccaaagctttcttttgaatgcttatcatgttctctaggttttctccactttcatgtaatatatgacttatttcatttagcgacaacccaatgaattttaaggttgtaatctgctgaagctttaataggtcttcttcacagtaaattctatatccagaatcagttttttcactaggcttaagtaatccaattttgtcataatgaagtaatgttttcactgtcactcctgatttcttagcaaattcaccaattttcaatttatttccctccataacattattctaatccattaccttagggtatagtcaactctaattttaaagacacactatctttcatgaccttttcgacaaattttaattaatattattaactattttatacgttatactcttattttttcccatataattccgataaaataattgaaggaggaataattaacaatgagcagtataactataaattcaaatcgaaccaatttattcaaaaatattaatatcaattcaactgatgacaaaaacaaaaatgttgttaatggtaattctagtattactaataaacaagataaaaaagaaagcggtttaatgcaaaatcttctaaagcaaaaacaagaacttaaagaagaaaaacaagcattgatggctaaagaaatggacgcaaaagagaaaaaagctaaaatggatgaattaaatcaaaaaataaaggatgttgattctcagattcaacagctaaagtttcaagaaaaacaagaagaacttcaaaagaaacaagatgaaatttcaaagaaaaaagctaaagaggaaacacctaacaaagacgataataaaacaaaaggcgatgtaataatttctgctagcttaggtgaacttattaagattagtggctcacaaaaaactatacatttactaaaggatagtaaaaacaggcaaaaagtagaagctgaatatatcaaaccaaataatatcgaaaacagctacgataataatcgtttatcgcaaataggcgcaagcatagccaatataaacatgaccatttctaaaaagattggagacataaataaaagtgctgaacgcattcaagctaaaacagaattagcgcttaaacaaatcaaagataaagatgacaataagttaaatggagaaacaaaagacatagataataatactaataaattagataaaagttcaaaagataaaaccaatagtaatttaaatacgaaacctaataataatccatataataaaactaccgaaactatagtttagcttctaaaaaaacatattaaaatattccatcagattcaaaaaaatataagacagcccgcctcattgtatgggctgttttatatttgtaagaataattataataattctttaactacttttataacttcttttgctatatattcagcatcttctaaagataatgtagtatatactggaagtgtgatctcattttcatattgtgcataggcattaggataatctttaatatcatatccaaggtttttatatagagttagcataggaagcggtttgtaatgaacgtttgttgctattcctatatctgctaacttttgaatagcttcgtttctctttttctcattaaatcctttgactctataaaggtataaatgatatgatgtctcagttccattctcatcttttgtaaatggaattattgaaaattcttcttttgataaaatatcactatatatcttaaatatttgtcttctcttttccaacattttctcatatctttttaattgaactaaacctatggctgcccctatatctgtcaaattacacttaagtccatcatttataatgtcatattcccatgcacctgcttttaacttacttagagcatcttttgattgtccatgcatggcagtaaatctcatatatttaagtaaatcctcatgatcaccaaagtggttgtcattaaatgtaacagctccaccttctcctgtagttagatttttaactgcatgaaacgaaaatgagtggaaatcacattgagatccaactggttctcccttatatttagcaccaaaagagtgtgctgaatcgcaaagtattataatatcttctctatttttatccttcaaaactttctttaaagcatcataatcaaacggcactcctgcaatatccactggcataattacctttgttttatctgtaatcttatcagcaattttatctatatccatttcgaaagtatcttttttaacatcaacatatataggtttaatccctctatgaatcccaacgcttgaagtagcagtatatgtatatggagtagaaataatttcatccccctcttttatatcaaatactttaagcactagttccattgcagcagtcgcactatttaatgctaatgctttattaacatttagataattttgtattccttcctcaaactctgcgagttttggtccagaagtaatccaaccagatcttaatacattaccaactgcttctatttcttcttcagttatatctggtggtgaaaatggtatctttttcatataattcatcctctctaatttaagcacaaaattttaatatatatgttgcaatccataatgcatatttcacaattcacaattacggctaaaattctttcaatatttttagaattatgatgaataattatttttgtaacatatatataatagaatctctaaaagtaatttataggaaataacttttatattagactctcttttatattattataaactccacccttaggtaagagtcaagttaaaaatatttatcttagaataataaataaaccaccattttcagctagtctatttataaactagttttttctaaaaataggtggttgtttaatcaaaaagccatttctacatgcaatgataatctttaactatttattatccctgtttttttacggagctagctaattataattcaacaattactggtaatatcattggctttctcttcatttttgtataaacataattgtcaacttctcttcttattccattctttatttctgcccattgagttatgtttctatctaagcatttttctacaacgttagtaactatatttctaacttcgtctattaattcttcagagtttcttacatatacgaaacctcttgacactatgtctggaccagatattataattttatttcttatgtctatagctataaccactgtgattataccattctctgctagattctttctatctctaagaaccatacttcctatatctccaacccccataccatctacaagaactcttccaaatggtacttttcctgatacttttccagtagctctagttaattcaaaaacatcaccattttctaaaataaatgtcttagatttgtctactcccatactttctgctattttagcatgagtaattaaatgcttatactcaccatgaactggtataaaaaattttggttttaataaagcttgaattagccttaattcttgttcacaggcatgcccagaaacatgtatatcttctattgatttatagattacattggcacctttctttattaaatcatttattaagttagataccgccttctcattaccaggtataggacttgccgagataataaccatatctccttctattatttgtatatgcctatgtgttgatgcagctattcttgataatcctgccatagattctccctgacttccagttgtaacaatagttagcttatcatctggataattctttatttcatctagacttattatcatatcttctggaataagtaaatatccaagttccatagcaacttcagatatattttccatacttctaccgctaaaagctatttttctgttatattttattgaacaatcactaatttgttgtaacctatgaacatttgatgcaaatgtagatactataatcctaccagtagccctactgaaaagattttctagtgtttctccaactgttttttcagacatagtgtaacccttatgaagagcattagtactatccgccattaagagaagtacacctttcttccccaactgagcatacctttgcaaatccataaccttcccatctattggcgtaaaatccactttaaaatcaccgctatgaacaataactcctattggggtatgcaatgcgatagaacagctatcaggtatactgtggttattccttatatattcaatttttatttgctctaattttattagttctcccggttcaacaacatttaatgtacagtcactaagcatagtatgctcttttaatttaccttctattaatccaagtgttaatctagttccatatataggaacattaatttgctttaatacatatggtagtccaccaatatgatcttcatgtccatgggtgataaagatccccttaactttattcttatttttaatcaggtatgttacatctggaattactatatcaattccatataagtcttcatctgggaatgctaatccacaatctataactattatttcattatcatattcaaaggcagtcatattttttcctatttcaccaagtccacctaatggaattatcttcagtggaatttgtttaggttttgtttttttattgattttatttttactaattccaatttcattattctccatattatcacacctcaaaagtttttattctatgctttaattatttacaattaactttaaatatataagtaaactttaaaatttattttaacctaaaaagtagcatcataatttaaaaattataatgctactttttatagttatattcgtctttaaatatcattaaattatttcgatattaaacccataaattatatttatatatataatatgcatggaataatatcttaatatttttactgaaaatacattgcttttaatttatcagctatttcattttcacaacttgatatttgtctgattccatatccaagaagcaatggtgaactgctgaatcttggcatgaccttacataaaattttattttttatatgatagaaaaatatattaaaactatcacacttcacgaaataattatttaaaaggtaatgaactacctttctaagattatatgccaactcatttaatgcatataaatcatcacttataattatattaaattcagtaaatccattaaatggtttatgtgatagattaactaaacaattatcacttttatgaatttctattccttcaaaataatcatcttttatatttaatttataatcaatgtcatcaagacctactatctgcatatgaggatgttttaagcttccgccagaatttggaccatggtttttataaaatattactgatttatattctccgcttgcctctattcttagccaatgtttaacactaaatcttattaaatcctccatatactctgcagaatactgacccatatcagtattacaattatacgtttctataataactaattgataagtatcttttatagtcggatacttattttttagtaatacaaatggcccgtcttcatcaataacatctgtaagtgtctctctattgcaaaacggacattcctttatatttatttttttaaattcatttggcttatccttattaatttcatttaaaaatactaaatacttatcgtttcccatttatatcaccaaaaaccttccatcaaaatcattttttaattaatacatgtgcacactttgaaggaacagttatactattaccttctattgcgtaaatttcatctactccagctctttccttattaacaaggacactccatccacattcctttaaatctataaatgcttcctcatcatttgggttaaatattacaactatagtattacacaagtttttctcactgttatcttctattttatatgctacaacattttctttgtaaaaatcctctccatactctaaaaatgttaaattctttctaatttcttcacttgaattcattctgaacgctttatatttctttcttaatttaattagacctttatagtaatttacaatttctttatattcaaaaactctatcccactctaaattatttacgctatcaggagcattataactatcatgactaaagcttccatcatcatttttcttagtccttaaaaattcttctcccgcttgaaagaaaggtatcccttgagatgttaaaactatagccgctgctaacttgttcatattcttacgtttttcttgagaagactcattgttagttaaatatagtttatcccataatgtataattatcatgagccgaaatgtaatttatacattgataaggctcatttgcccatgcaaagcgtgagtatatgactttatcatagttaatgccttgtttaccagtagctcctacaatacagaatttaatactttcttcaagccctgttctaccatttacatatcctttttcatttatattaaacacatgtcctttaactgaatctctagtatcatcactaaatgctgcaatttgcattttatcaaattttactatattttgctttactgatgactcttcaccacttaatggagtccagcctccagtccaaccttcaccatacataagtatagatgtatcaatcttatctaactcagctctaatttgcttcatagtctcaatatcatgtaaccccattaaatcaaatctaaatccatctatatgatattccttagcccaataaattactgaatcaacaataagttttcttaccatatatcgttctgaagctaattcattgccacaaccagatccatttgaaaaatttccattttgatcctgtctataataatatcctggtactgccagattaagattagattcatgacttttataggtgtgattataaaccatatccataacaactctaagtccagctttatgtatacttttaaccatttccttaaattctctaattctcttttctccattaaaaggatttgttgaatacgatccttctggagcaaaataattctttggatcatatccccaattatattgtggcatatctggtttactttcgtcaacagtttcataatcaaacgccggaagtaaatgaacatgagttattcccaattccattaaataatctattcctgtctttgtatattttcctggaattgtagtcccatgctcacaaaacgcggtatactttccttttttgtttgagcttattcctgaattctcatttattgaaaaatctcttacatgaacctcgtatattacagctgccgttgcagagcttagctctggttttctatcttcctcaaaatttattggatctgtttttttaagatctattaccattcccctgtttccattaaccccaagggcttttgcgtatggatctacaacttctctttcatttccactattaattattaagtaattataaaattcaccttcaagatttcttttcacctctatgttccaagttccttgtactcctcgattcatgtctaatatttcttctggtgcatttgtataattcttttcatcctttccaaatagcgccagtcggacattatttgcatttggtgcccaaactataaattttgtaccatctttacaatattctacaccaagattcccatcatagttattgtactcattatctaataaattcattatattattaccccttttactagttttattaaatgtttttcatgtaaataatatttaccctatccatatattcttaaattctagcagattatctccatgttactttcttaattctgttattattttacccgaaaatgctgggaccactatgcttgtttcattagcattaatcactatttcattttcatctaataaatcaatacctttttcgaagggtaatttaaattctaaaacactttctttatcagataaatttaatattacaaaaactctatcattatcagtatttctagaaaatatgaattgttcattcttaacaacaacttgttcataatccccatatcttaatgcttcactattaattctaatattacctaaccttttaattaattcaaataacttatcatcttgttcatctatttttccaaattctaattctggtcttaaaggtaagtctgtaccatttcctttaactcccttgagaccatattcactcccataatatacactaggcacacctggcattgtataaagcaatatatatgaattatatatatattctggcttttttaatgtacttgctagcctgttaacatcatgattatcaacgaagttatatagacatagattcttataaattccgcctaaaccaaataatctatttaatgaatatgcaatttcaaaatagttcttatcgttatgacttgaataaattcccttataacattcataatttgtcacagaatcgagactttcaggattagcccatttattataatctccatgaataacctcacccattaaccaaaaatccttcttctttccgtctacaaatctctttaaaactttaaaaaactcaaaatcaatgctatcagctgcgtctaaccttaacccatctatatcaaattcatctatccatgtacttacagcctgtaacaaatgatttctaacttcttcattcttcaaattaagtttgactaaatcataacagccattccagctttgataattaaattcatcccccatcggacttttgctattgaaatttaaatctgcaaaccagctacaatacttagaatttactccgtttatctgaacatctttaaatgcccaaaattctcttcctacatgattaaataccccatctaagattattcttatatcattcttgtgtaactgctcacatacttctttaaaatccgcattagttccaagtctttcatcaactttgtagtaatccttggtgtcataaccatgataactcgactgaaaaattggtgaaaaataaacagcattaattctcatttcttttaaatgaggtatccatttttcaattttgtttaacctattttttttatcatatactttacctggttctaaaacaccacaaaatccaagtgtatagaattgataaaatatactttccctaatccataaattcataatctcatcccctttagtttatatacattataccactttgacgccatttttttacaccactagtttataaataataaacctgatttttagacgcccttatatttatcaccttcctaattatataaaaactctccataattagaaatacatattggaagtttatatattttatttctataataagaaaatttatataaatattattatcatttttgtcacatactagatattgaaattaaatatctacggaggtataaaaatgaatacaaaagctataaaatacataacaactttcttattggcaataaattgcctaacatttcttcctaaaccaacagttgcaagtgcagcttcttactcacttggcggcttaaagatttcaacttactatgctcataaagataaatctaatcgttttaatgtgtttggagaggaaaattataaatatctttctgccgaacaaaaaaaggaattgcttgaattaaaaaaatgtaaaaataaaggtcaggatctttcagaagagcaacagaaaactctacattcacttatagattccatcatcaaaggaaaactcggagataaggactatgtagattttaaaagtttagttgaaaaaaaacgttctaatgagaatttaacagatgaagaaaatgaacgattaaaggattatacggatattattaatggtaacaaactttcaacgaaagatatacttagtcaatttctaagataaattgtatctcatgcttataaaagaacaaactctaatcgatagaatttgttcttttaacgttatattattattaaatgctattttcgtagaatgacaacatcctataaaaaaaagaaaaagctatttcatctctttcaaaatacgattcatgtttagagcctttcatataaaccaccttacaatctttagcataatcagcaaacctattctgtgcttttgggataacatgtgtatcatattcagcttgaaataatagtattggtaccattatttttgatatattctttcttctgattagttctttagttgcttttaaactttcgatataccataaagccgatgatccaccactatgataattatcattctttttaatcttttccaaaagatattgatatcgctccttacaactagtcgatctactgtaaaaatccttcttttcaacatatggcttctggcctggaagatatgaatttccttttccgcaaaccctcattgctttagaaataatatttgctaaaatcttaggtgctttcccagtattaatttcatgcattggtgaacttaacactgcagcattaaaataactattatatttctctaaaaaaacagtacctatacatcctcccatagaatgtgcaaataataacaacttcttattcctactatctggaataacaatttcatctataaactttttgaaatcttctacatagtaatcaaagttttcaacattaatctgataattatccatcccaagtctttgtgatctaccatgccctctatgttcaagaataaaaacagagtagttttcctttataaaataataaattagttcattatatttttcagtaaattctccaaatccatgacaaatgactatattagcttttggcttctttacaatgaatttttcgtaataaagttttaagtcatttgctcctagaatatagccactttctagattcttctttagataaggttcaactatatttatcattttttccttataattatcttgtgaaatatatatttcaagatacttatccttaaaatttgagtatgaagatgccgttaatgctaagttatcttcattcataatcttcccctccctacctataaattttggaatcaaaatttatcttaactactaatataaattacttattttaaatccattataatttcaagttaaaatatagattgatttataaatttacatacaaaaataaggtaaatattttaaataaaatttacttattagaaattttttaaaacaactaccttattatatactatttatcacatttttattttaaatttatttacttctagttaaattatattaatctctaattatattttcgtaatagttataaactacataaactttctattttataataatatctctttaatatataatttcttttctttttctaaatctataaactcttcgcccttcaaaatcagaggcttttctaaattatttacattcatctgtattatcttgcatttttcattagtatttaataatacctcttcacctgtataataatctataacatgctctaaaaatatctttacatattcgtaatctagttttcctaaactttcgtttttaactatttgcaatgcttcaaatggaagcctttttttcttatatcctctatcagaattaattgcatcaaatacatcagctatagcgatgatttttgcaaaaggatgtatagcttcaccctttaacccaagcgggtaaccagatccatctaatctttcatgatgcatcagtaccccatagctcacagccttgtccaaaaatgaaagttcttttattaccatatatcctttctgagcgtgggtttttattgtattaaattcattttgtgttaatcctacttctttcattagtaattctcttgctatttttgtctttccaaaatcatgaagaattgctgaatatactaataaatttaacttcgccttttctaatcctgtccattttcctatgagtgcacttagtgctgctacatttactccatgtctatatattgaatctgttccacttccataaagaactatattctttataaccaagctacctggctgtatctcattttgaatttttctagaaaattccctcacttcgtttagagcttcttcattgttattgacaagttgtctaaaagtttttcttaatgctaaagaaatttcattgaattcttcttcaatctttttacattgtgtctctttctttaattctacttcaatactttttgcagcaatattttcacaatatatctctacattcccaataacatataacttttttattttttctataatttgttcagttaccgaaatatcctttttaagtaatacactcccattttgctctacatttttagctattaccattccttcttttaactggttaaagcttattacttttgtactcttctccataatactcacacccatcatataacaaattttatgtctctaagtatagacagaatatatatctatctctatgacctaaaaattaaaaaatcccctaattaaatatataagaacaataataaataagattatattaaacttataaaacaatattcgagtaaaaatttatttattatttatattattctatatcttttatattttgtcaaaataagttttaatttattttgaattgtagttcttccataatattgagaaaatatatgtatataatataaggatgaaatttaacttccatccttatattatatcacttctactatgactctatttatacacacattattctatgggagacgctttcttatttccagtcttagcttttccttgtatctctattggaacatcttttacatcattttttttataatgtgttttatgattactttctgttccatgtggttcacttgggtctggtcttctcattcctgcttttgccataactacttcatatcctttctaaaataatctcaattttagtattctaaaaaaattctatagtatacatgagattaaatagaaactgttggtatagtagcatcatcttcaaaaattattttagttgttttctatccatctattccattcttctgctttatatccaactgttgcttctttaccatttcttactataggaatatttataactttttgattttttaataataattctgctttaatctctgcacttcgtatattattaaagtttaattttacatattcctttgccttcgtatttattaattcattaatactcaccgctttaattatgttattaaattcgcctttgctcataggcttttcatttaaatcgataaactgaaattttatatttctttctttaaaaaatctttctgcctttttagtatcaaagcatttcttagttccaaatatttgtatattcataaatccatttcacttactttcattttaattttctttaggtcacctcacacaatattccaatccatgcattattttaaattatatataaatttaaatatatgtgttgcaatcacaattcacaatgcacatttcataatttacaataatggttaaaattcatgcactatctttagaattattatgaagcattatttttgcaatatattgttggctaaatcatagtttgattatggacaaaaaacaaatatattttgactttatattgtgtattaacaatttaaaatttgcattataacaaaagaaaatccttacttttaattatatactaattactagcatatgattatctctaacctcaagtaagaatcttctctttcaaattactattttaactctttgatactaattctctatttttgctatagtatctaaagcaacttccatcatatttgtaaatgtcaattgtctttcttctgcgcttgtaacttctccagttacaaagtgatcgcttactgtaagtaaagctaatgcattaactccaaatttagctgcaattgtatataacgctgctgcttccatctctactcctaagcaaccaaacttagcccacttcttccaatcttcatcatcatcgccataaaatacatcagagctatatatgctaccaactttaggatcaaagcctttttcaaccgctatatcgtatgctggtttcaataattcaaaacttgctgttggcgcaaatgttctaccttgaaatcttactaaattaagatttgaatctgttgatgcagacatagctattataagatctctaaccttaactttttcgctatatccaccgcatgttccaactcttataagatttttaaccccataactttgtatcaattcatttgcatatattgaaattgaaggtattcccattcctgttccctgaactgaaattttcttacctttatatgttcctgtaaacccatacatacctctaacttcattatagcaaactacatcttctaaaaagttttctgctataaactttgctcttaaagggtctcctggtaataatacgctttctgcaatagcaccttcaggtgcattaatatgaacactcattttttacctccataattttaaccacatcatctcaattaatgatcaatatatttaaactattttataataataatttatttgctttcactaactatagatatactagcactagcaccaattctacttgctcctgcatttatcatatccatagccgtcttaaaatctcttactcctccagatgcttttacacctaaatctgacccaacagtttttctcattaacgcaatatcttctttagttgctccaccactagaaaatcctgttgatgttttaacaaaatcagctttagcttctttagctatttcgcaagctttaactttttcttcatcacttaatagacatgtttcaataattacctttactaatgcttttcctttggctgcatttacaactgcttctatatcttctttaagtaaactataatttttatcttttaatgctccaacatttattaccatatctatttcagtagctccattttcaatggcttgatttgtttcaaaagctttagattcctttgtcattgcacctaatggaaatccaacaactacacatgtcttcacatcagtccccataagttcagtacttactaattttgcataacatccatttacgcaaactgaagcaaaattgtattctttagcttccttacataatttttttacatcctctacggttgcctccggttttaatattgtatgatctatatatttagctatatccatatttcattactccttaaatttattttataactatatatgttaaaattcacaatgcacatttcacaattacgactaaaattctttcaatgtttctagaattattctgcaacatatatataactataatttgaattaacaatcagcactttcagcgaaattttcgcagtcctgtgaaatagcaatctttcttctttctattaacgagtacctttttcgtaaggaactccatcagcttttggtgcaactgattttcctacaaaaagaattaatactacaattgttagaatgtatggtagcattgcaagtatttgtgaaggaatagcaaagtttccgcctcctaatacaactgttaatgcctgagcaaatccaaacaataagcaagctccgtatgcgccatgtggagtccatttaccaaaaataactgctgctaatgcaataaatccttgaccgctaattgctgttggagtaaattgtgctattattgcaagagtcatagatgctccgccaaaccctgcaagtattccagaaatcataacacacacgtaacgagttgcagttacacttattccaagagtatctgcagctgctggatgctctcctacagcacgaatacgaagtccccatttagttttatataaaatgaaccaaataactactgtaattaaaagtgctataaaaactgtaatatctactccaaatactttaggtaatttagtagctactggtttagtcatagtagctccttcaaataataacctacatgtaaataaagagaaacctgcacctagtaaatttatagcaatacctgatattgtctgatccgcattgaatgttatagatgcaactgcatgtaataaagccattattccccctgcaattcctgcagctaaaaatccaagccatgcatttccagaataatatcctactgccgcaccagtaaaggcacctatagtcatcataccttcaattccgatatttacaactccagaacgctcagaaacaactccacctaatgctccaaatattaacggtgctgaatacattagtgtaatacctattaatagtgcaatactatttaacattcttctcacctctctttaaaagtctgtcagctaaagcaggtacaatcttagttaatgctacgaaaaatacaatagtacctatcattatatttattatttctgatggtgcacctatagcagattgtacagattgacctccatatagtaatccaccatataacaagcctccaaatatacatccaataggtgaacttcctgcaattaatgcaactgataatccattaaatccgttattttcaaaagcagccatagtagataacttatgaggtgctgtgcctgtaatagctagtgctccagcaagacctgataatgcacctgcaattaccattgattgaactatattacgattaacatttattccagcaaattctgctgcatctttatttaatccaactgcacgtaattcataaccttttgcagatttatataacaaaattgatataactacagccattataatagcaacgataattccaatattaacatctgtttttaacaaaacttctgataaccacttgtgatgagaaagaaattccattccagcatcagaagtcttccaattaccaagtatagtagtaaatccagattcattaatcatataagtacttgttgaatctggttggtgaaatacatctgtagatacaacgaaattagataaatataatgcaatccaattcagcattatactggttataacttcatgtattccgaatttcgccttaagaattcccacaataccaccaaacactgctccagcagctacaccagctaaaattactaaaggaatttctaatactgctggtaaatttaatttaattccaactattgttgatgcaattgtacctattatatattggccctctgctccaatattaaataatcctgttttaaaggcaaatgcaacacttaaaccagttaaaataataggcgtagccttaataattgtattagatatatatttaggttttgaaaaaattccattaaaaagtgcgctaaaagcatctattgagttatatcctgcaataccaagaactattgcagaaactacaaaaccaaaaaatattgcaatgaatgttgaagtaactggttttttaagaatctttgccactgttttcatttcttttacctcctgccattaataaacctattgtattttcatcaacttctccctgcttaaatgtatctacaatagtccctgcataaattacagctatagtatcagaaacattcataacttcatcaagttcaaacgaaactaacaaaaccgctttgcctttatctctttcccttattaatgttttatgaacatattcaattgctcctacatcaagtccacgagttggctgtactgcaattaataagtctggatcattagccacttctcttgcaattataactttttgctgatttcctcctgataaacctctaacaggaattaattcacaattgtcaggtcttatgtcatattgttttatcatatctttagtatgagatataatttcgtctttatttaagaaaccatttttgcaatatggttcacttttatatttttctataactacattatcagcaacactgaaatctaatacaagtcctcgcttttgtctatcttcatgtattgttgatactttattcttaataacattttctgttgtagtattttgtatctctactccatttattttaatggtaccgctttcacattttgttaggcatgtaattgcttcaattaattccttttgtccattgccatcaattccagcaataccaacaatttcacctttatgtactttaagtgataagtttttaactgcatctaactttctttcatcttttacagttaaattatctatttcaaagacaacttcatctggttttgcaggctctttatcaacaactaacttaactgcatgacctaccatcattgtggcaagctctgatcctgttatctctttaacattaacagtatctatatatttccctctacgtattattgtacagacatcagaagattcctttatttcttttaatttatgtgtaattataattattgtttttccatctgctacaagattattcataatctttattaaatcttgaatttcctgaggagtaagcactgctgtcggttcatctaatattaataaatcagctccacggtataaggcttttaatatctcaatacgttgttgcatacctactgaaatatcttcaatttttgcatctggatctacttctaatccatactttttaacaatatttaatatttccgcgcgggcttttttcatgtctaatatgccaaatttacttgtaatttcactacctaatactatattttgtgttactgtaaaattttcaactaacataaaatgttggtgaaccattcctattccattttcaatggctatattagggtttttaatatttatcttttcaccattaagatatatttctcctcggtcagcttgatataatccgtaaagtatattcatcagtgtactcttacctgctccattttctcctaatagtgcatgaattgtacctcttttaatatcgatattgatatcatctaaggcacagaatgaaccaaacatttttgtaattccacgcatctgcactgcatattgtttgctaatttccataccaagtcctcccttaattaataatatgctttgctaacagtgaatcactagctagcaaagccatccctatttcatatctgccatatatatattacaattcattttctgcattttagccttaagccattgcacatagcttcctagaactttaaatgtaaatttatcattgtcacacatatatattatttaattatccttatttaccgaagcttttaaatgtatcttcattataaggtggaactatttcacccttcttaattttgtcttgaactgccatagctgccttataaacttctggatccatgtttttattttcagttggaattcctactgcattttcttttaaaccataagtatatgtttttccaccgattttatttccactcatagcttcttttgaaagattttcaactgcaacatttgcaagttttaatgctgatgttaatacattgtcaggagccaaatatgcttggtcacggtcaacacctattgcaaacttatttgcttctttagctgcttcaattacacctacacctactccacctgctgcgtggaatacaatatcacatccagatgagaacattttatttgcaattgctttaccctttgatgcatcagagaaactttcagcatattgaacatctacagtaatatctttacctaattcttttgctgcatattgaacaccagcttggtatccatattggaattgatctataattccactttttataccaccaacaaatccaactttacctgtttttgttgttttagctgctatatatccaactataaatgaaggttcttgtgcattaaacataactcctgtaacattagctggagtatcatctccatatgaattatcaactatagcatagttaacatctggatttgattttgctgcttttaatattgcatctgacattgcaaaaccaataccccaaactaatttattgccgctatctacaactttatctagattagtagcataatcagattcttgcttagattctaagtaactaacttttgcacccttattgtttttttcgaagttttgtaggccttcccatgaagattgattaaacgattggtcatttaccccacctgtatcagttaccatagcaacttgatattcttttgcattgctgcttcctttgtcagctgtactagtaccgcttccacttgatccacatccagcgaataacgttactgttattgctgaaactgctaataatgataataatctctttttcattaaccttcctcctaaaatataagaattaatatttaaactcatggataatatccacgatttaaatttaataaaacagttattataaatattcttctaattaattatatttataatatgttgactttaatattacgaatatgtattcaacttgtgactatgtatatatgttgtaattcacaatgcacaattaccactaaaattcttgcaatcttttttaaaattatgatgaagaattacttttatagcgtatatataaatttatatctttttctctgaacctttaactacaatttgtggtgcaatgatccttcttcttacactatcatcctcattgctgctaataatatcaaacagcatatccatggaggatctccctagctcaattggacaatcttccatatatgtaatatttaatcctaccatatctaaaaagtcaattttatcaaatcccactatagccaagtccctaggaatatccttattctcttcttttagagcttttataactcccatcgtcatcatgttactggaaacaactaatgctgtaggacggtctttttctttaagtaattttttagtcaattcatatgccttatctaatttaaaatctccatacaaaacatatttactgcaaaaatcaatatcattttcttttagcgctcttttatagccctctaatctatccattactggttctgaactcaataatcctgtcattattccaatcttagtatgaccttctttaattagcaggtttgttgcctcaaatccaccttttatattatctacaaaaactccatttaactttgtaaatttaacatcagccgaaactaatattataggaatatttaaagtatttattgttttaatataattttcattaaacttttcttcaccaaatcctggagtcattataattcctttaattctttgttctttaagcaatttaagagcacgcacttccttctctaaataattatctgtattaaacaaaattatattcagattatttctttctgctctctcacttactccttttataatttctccaaaatatgcattagttatatctggaacgataactcctatagtattagtctcgcatttcgacaaacttcttgcaattgcactcggtgtataattcatttcttttattgcgactaatattctttgcctagtttcttcttttacataacctgaattattaagaactcttgaaactgttgccgaggatactttagcccttttcgcaatatcatttatagtaactgacataacaccccacctcgtcaaatttttttcataatccatcaaaatttattccattattaaaactaaatcgtgaaatactattatttatagaccagattaatttataacttaaattcttaatttctaaggctttaagccaagttatttttaaagtcgaactatttatggtatcgcttccacacttataataatatattaggaatatgatgtcaatattcatagttttattgatttcactataatatttatcaatactacatgccatttatcttcagtttaagccattctatgtctatactagtataatttatgatatgtatatttacaaactttttttattaatataattttatttcactcttctctaggtatatattaaaggagtgatctaaagtatttttatacttaaaccactccatttttattattttcctctcaatttatcaagaaatctctttgttcttttcaatgcttccataatatcttccattgatgacgcataacaaactcttataaatccttctccacaatcaccaaaagcatttcccggaataactaatactttttcatttataagcagttgttcacagaattcatccgatgttatacctgtagatttaatacttggaaataaataaaatgctccaagaggctcaaaacactctaatcccatctttctaaatccatccaatagaactcttcttcttctattatattccttacacatttcttctacacttctatcaccactttttaaagcttcaatcgctgcatactgagcagttgttggtgaacacataagagcatattgatgaattttcttcatcgcttctattagaatcggatgtccacagatatacccaagtctccatcctgtcatagcatatgatttagaaaatccatttataactaaagtcttatctctcatttctggaaaagatgctattgaaacatgtttctctccatagcagagttctgagtatatttcatctgaaattgcaataatatttttatctttaagaacttctactattcctgctagttcatctctagtcattattgcacctgttgggttattaggaaacggtattataactacctttgttctaggtgtaattgctttctccaaatcctcaggagtaagtttaaattcatcttctgctttaaggttcaaaaccttagctgttgctccagtaaatgcagtacatcccttatatgcaacaaagcttggctctggaactataacctcatctccaggcccaactaatgccctaagtgctatatcaattccttcacttccgccaacagtaactattatttcatcttctggattatagttaagattaaatcttctatgaagatactttgatatctcactacgaagctcaataaatcctgcattcgaagaataatgagtatgtccttgctctaaagaataaattccagcttctcttacattccacggagttacaaaatctggttctcctacacctagagaaataacgtcatccatttcatttattatatcaaaatattttcttattcctgacggaggcatattttttacgttgtctaaaatcatgtcttctaatctcatataaatattgcctccctatcttctatcttcttttctttaaatatctttccatgatctttatatttcttcaatacaaagtgagtacctgtacttaatacatattcttgcactgctagtttttctgatacaaaaagagcaacttccttcatagtctttccttcaacaataaccgttaaatcaaaacctccagacattaagtaacatgctttaacttctgaaaatttatatattctttctgcaactttatcaaatccaacacctctctgcggtgttatcttaacttctattaacgctgttactgtttcactacctgtattttcccaatttataagcgttgtataacctgctataatgcttttttcctcataatctcttattgcttctctaacttcttcaacagttttacctgtcataactgctatttgttcatcactgtatctgctatttttttctaatatctcaagtatttcctccattgaaaataacccccttattttaatataattaaataaaaaaagtcctccatcccacacaagggacgaaagaactacttcgcggtaccaccctaataaacaacttaaaaattgttcactcagctagagtacatattatactccacctctataacgtgaggaacacgttatagcctaattaaaaattcttattttctaaaaatttttatttctcagctataaaattcaaaggctgcttctataaaggatacttaccagattccaccgacctctagctctcttaaaagtttaccatttatatactcttccttatcactatctttaaaactttatttttaaaattaccatccaatatgactataaaattttaaataaaaaagattatacgaaaaatcaaatcactttttattcaaatctttctttatattatactagcaaaagtataaaaaattcaatatattttttatatttttttatttaaatgcagaatattctattgaattaactaaaattgaccctaaaaaatatatttatatcatacggaaataaaaaggagcataagatttaatcactcttatgcttcttactcaatcaatagaaaatttattactttctatcttctattgttttgttgctttctagctctcctgcagtcaggacatcttactggttcattttcaaaacctttttccttataaaattcttgttctcctacagtaaaaacgaactctcttccacaatctttgcatattaatgtcttatcttccattctaatgttccattgctcaagttaaaataactttgcaatagttcacctcctctttttgcttaaaaatttctttttgtcatttaatattatgtctgtcttcataatttttattcaaaaacatattattatatagtttatatttaattatcatgtaatctatccagatgatattacataggactaggactcttttacatttattttttcatatataataatgaatcacattactttaagtagatttaattgatctttaactcaaatttttcatttacaaaatcaattacacactttccaccttcgcttagctttccaaataaaatttcatcaacaagtaatggttttatattcgaagctataactcttgctatttctcttgccccaaattcctctgatgttcctattttagcaatgtgatttacacattcttcactaaattctatttcaatatttttagaattcaatttatctttaaagttatttaattgctttttagcaacatttgctgccataatatcagtcattccattaaatactattattttatccagtctatttctaaattcaggtgtgaagaactttttaacctcttccattatagcttcacctttgacttccctatctccgaaaccaataagctttttacctatatttctcgctccagcattagaggtcattattattattgagtttctaaaatcagctttcctgcctttattatcagtaagtgtggcataatccataacctgaagcaatacacccaaaatatccgggtgtgccttttctatttcatccagtaataatacgcaatgtggcgtttttcttattgaatcagttaaaagtccgccttcttcataacctacatatcctggaggtgatcctatgagttttgcagctgaatgtttttcagtatattcactcatgtcaaatctaatcaaatctattcctagagttttagataagcatctagcaatctctgtttttccaactccagtaggcccaacaaaaagcatcgatgctactggcttatcttcatcgtttaatccagatctagacatctttatacatcttacaacttcttcaatggctttatcctgtgaaaatatattttcctttaagtccttttctaagtgctttaaagaacttatctcgctactttccacagtttgctttggaatattacaaatctttgatattatttcctcaatagtttttctgtcaactataatctgctcattcatatcttcattatgcatacgaacataagctccagcttcatctataatatctacagccttatctggcagatatctgtcattaatatacttatcgcttagagttactgcatctccaattgcttcatctgtataacttacattatgatattcttcataattctttttaagtccatctaatatttgtatagcttcttttatagatggttctttaacatctattctttggaatcttctacttaatgctttatctttttcaaaaaactttttatattcatcaaaagtagtagctccaataaatctaatttttccttctgtaagataaggctttaacaaattggacgcatctaatgcgccaccatttaacgctccagcacctacaatattatgaatttcatctatatatacaattggcttatcttgtttgctaatcaaatctaagactctttttattctttcttcaaaatctcctctatacttagttcctgctataacagatccaatatctaaagaaaacatagaacttccttttaatttttctggcaccttgtcttcacttattaactttgcaagtcctaaagttatagcagtcttaccaactccagactcacctacatgtataggattattttttatccttctacagagtatctgtatacttctttctaaaatatcttttcgtcctatcaatggatcattttcttcttctgtagctttcttaataaggtctattgtaaacttattaagaaatgcatcttcttttttcttctccactttttctttactttcattctcagtaaattcattctcatcttctttaaaattttcttgcatttcatcatcataagaatttcgagtatcttcatctatactatgacacaaagaatatagcaaatctcttcttgtaacgccttcttgctctagataatatcgtgcataactatcttctagattaaaaattgcagagagtatatgatctacgtcaattgcatctttcccgctatacttaatttgttcatttgctgttaaaatgactctttgaaactctatgctctcttgtggttctccttgaccaattttatttatatatgttttcacgtaagttgccaaattatatcttaaattttctaaacttccaccacattctttaatagcatactctacattcttatcaaaagttgcagcatacagtaaatgctctggtgtaatatattcgctgcttttctcttttgcttcttggtatgctttaagtaatatcaaattaacttcattcgtaattttcatattttacgcctcctctacagtaagcttaaacggaaagcctttttctttagccattgacattgcagttgaaactttagtaactgctatatcataactatatattcctgctattcccttacccctttcatgcacatctaacattatcttctcagcatctattaactttttattaaatacaactaccagtatattaataacgaattccattgttgtataatcatcattatacataacaactttataattcttaggctttttcacatcaactttattctttggtttggttacaatatttgtttccatatataattgtctatccctccccgcatattatcatcatatatattattctaaatagatatattttaacacaatatttaagcttataccaataggattatagtaaattatagattcatcatttatattaatttatatctaaaatccgaattttattattatttactccaattatactttttttatttataatatagtcccttactattgctataacatcttttgatattatttctcctgggcaaaccaaaggtattcctggaggatatggtattattgattctttagctactaaaccttcacacttttctatttcacaccatctgctttttaatttaaaagtttcataaggctcaaattttttaataggtatatttctagaatattttatctctatttctctagacatatttctcatatctaaatttaaaatagtttcgtatataattttaaaatcttcttctgtattaaatggtgacaggattaaaacaactcctcttgaaaaactcatctcagcctgtatcttattatctcttagataatctagaaatttatgtccattataccctttaggaagaataactatatatctactaggatcaattttgtatccttctattctatcattatgcttatctaagtcactttcacttaatatataaacttttcctagtttattaatttttttcttccacttttcagattcatttattaatttatcataatcatctttcccgtatgtatctaaataatatcttgcataatctaaagatgccattatcagataagatggtgaagttgtagtaaataactttatgtaaaaatctattatgtcattatcttcatttactaagagatatgcgccttgagttagggctggtaaagttttatgtgcacttaaaaccacataatctcctaaactcgcaagagactttggcaatcttttatttattccaaaatgagctccatgagcacagtcgattataacttttaatcctatttccttcaaattacatataatctcttctatatcatatgtaattccaaaataatttggatatgttattataattccctttggttttgagctattctctaacgctttatatatattctctttattaggtggtaaaaatagtcctaattcatcatcaataataggttctatatatttaacttttaactttctcataatcaatccattataaattgacttatggcagtttctttcaactaaaacttcatccccctcatcaaatgctgaaaacatggctgctaagtttcctgatgagcttccatttactaaaaaataggctttcttagccttatacgttttagctaatagctcttgggcttcctttattatcccttctggataatgtaaattatctaatgggtcgacctctgttatatctaaaaatcccattctattaacaaactccagcccaatttcatctctagtaaatccaatcccccccttgtttcctggcatggaaagaagtaggttttcttcatcatgatatttaagtaatccttctaataatggtaacttcaaaaataccgctccaatctaatttcaaatataattatagataaacaacttaagaatttgatttatactttgaaataaataccatactagaaagtagaaacatttttatgtagcatgcattgaaaatgagctgttaaaagcgcttaattgtaggttgttcaactaatgcttgtcacaatgaaattgggagcaagcattagtggtgcaacctgcaatttagaactttcagcgaaattttcatagtcctgtgaaataacaatgtttttactttcggtggattattgcataagtctaggttatatattgtttatctataaccatggataaaagcttcatatcgacgttcaaacgatatgaagcttaaaacatgctttctatttcataaattaaatattctatattacacttatgcctttttccttaatctttttaaagatacttaattgttcttaaaagattctagttaatacttcatgccttttttatagatgtagatcttcgataaattctaatacaatttcttctttagttgcccatgatgtcactaatctaattgcagtataattagaatcaattactctttcaatattaaaagaatatttctcacttaacttttcaattaaattattagggaatatagggaactgttgatttgtaaaagattcagtcaaaaacttatatccttcatctactattgcgccttttaacataagtgccattttatttgcatgttttgcaagttcaaaatacagatcatctttgaataattcttcaaattgaattccaagcaaccttccttttgctaataatccacctttttgcttaataaaatatctaaaatcttcttttaattcatcattgcatattacaagtgcttctccaaaaagcgctccacttttagttcctccaatgtaaaatgcatcaactaattttgctatatcagctaaagtcaaatcattttcttccgctacaagtgcagatccaagtctagcaccatccaaatataatagcagtttattcctcttacagcaatcatgtaaatcaattaactctgctttcgtatatagagttccaagttctgtagaatttgatatatatactaatttaggttgaaccatatgctcatcgctatgagaatcaacaacattttgaattaaatttggagtaagttttccatcgttagttttcattgtaattactttatgaccagttgcttcaattgccccggtctcatgacaatttatatgacttgtatctgctcctattgctgcctgatgcggtcttaaaaaagctgatatagctgtaaggttaacctgtgtgccaccaactagtaaatgtatatctacatcttctctatcaattttcttcttcagcagattaactgatctttctgtgtactgatcagtaccgtaaccatcggtttgttccaaatttgtttcaactaatgcatttaatattcttgagtgtgcgccttcactataatcatttttaaaactgtacataattctgcctccttttatgctctctcaattatctgtgttataaaattcttcagtactttcctacctacttgaaaaatcatttcttttgttagtaactccatctctttaatctcattaatataaattttataatctccaaacatgcagtcatatgtagcaagctctttggccagtattatactctgctcttctctaaataatctttttaatttaaaactcttaattaaacgttctatctgatcattatcaagtttcttttgcaataaatctaactttgctatgcatccttctattaaagatatagctttatttacattttcttctgatgtactaaatgttattttatataattttatataattttcatttgaaattttagtaagtacatcatatactaacccattttgggttcttaaaacatcataaagaattgaattaaccccatctccaaaatattgattaaaaattctaagtgccttaatttctttttcacttaaatcatcaattggaaatatcatttcaactttacatgcccttattccacctcttacattgttataagcacccttttgaggcttttcgtattctattaattttttattatcaagtccactaataccttcttggataatatattttttcttccactcaaaaaaataattacatataatctccttaactatatcaaactttactgatgaaattataacaattgaagtatttcccggaaaataatatttattataaaattctttaatattatctaaagttatctcctctagatcatccaaagttcctattataggatactttattcttctattattgaagcagttaaaaaacaaattatcctcgcaatactggtctacatcctcgtcccattcttttaattcttcttttatgacatccatttcttctttgaatccattttctccaaattccgggttaattattatatcacttaaaatttccacacctttttgtaaatcttctccgagcagagttccataatagattacatatggatagtttgtcatagcattattaaatccaaaaatgttacttagctcttcatttatttctctctcagttctattttttgttcctttataaaccatatgctcagttgcatgagctactccaaacttttcattctcaactccagctcctgcatttaaagaaatacaaattgatgatagttctgaatctgtatgtttataaattaatctcaaatcattttccaaaatgtattcttccaagtatctattctccttacattcttatacattgcaatagtagatttacattaaaaatcttattgataaaaatttctcagttaacgctgaaatactgtgagcttcaattgcaatatatattatatttaattccaagatgtgcatttaaaatgttattatataaaaagagacccctcttgcgaagtgctcgataaaaaaatcatctatagaaattactaagtggaagctatttcatctatacttattttaattaatttaagaaacacgtacagattgttaaagcttttatcagtatgtcccaaataagattctctcagtagcaaaggcaatggagttccccttctttttagtatattattatataaatattaattttcttcagcttttagcgcaattgcacattcaattctcttcttttgcatcttgcatccaatttcataaggaatgttcatgtccccattaaaattaaaattgttagcttggcatccaccactacagtagaattttgcccagcattctctacatttaggcttattgtatatatgtgctttcttaaatttttgagctaattctccattataagtatcttcgtgtatacttcctaacttaaattcttcttttccaacaaattgatggcatggatacacttctccttgaggagttatagctacatattcaaatcctgcaccgcatccagaaattctcttgtaaacacatggtccaccttgaagatctatattaaaatgataaaatttaaattcatcatttccttctcgttttcttcttgccatttcttcatatagtttgtcatagtttttaaagattgtatctatatcttcttctcttaatgaaagtggatgtccattttctaaaacaactggttctatagataactctctaaacccttcattaaccattgccattacatcttcataaaaatctgtattttctcttgtgaacgttcctcttacataataagtttttcctttagttcttctcttaatcatttccttgatatttggaactatatcatcaaaagaaccgcttttatctggcttaattctaacattatcattaacttcttttctgccatctaaagaaagaattatatttcccatttctttatccatataatccatcatatctggagttaatagagtagcattagtggtcattgtaaatcttactctctttccccatttttcttcgttatccctagcatacttaattatttcttttattgtgtccataattaaagttggctctccaccaaataaatctatttctatattttttcttggtccacttctcttaatcacataatcaattgctttttttgctgtgtctgcactcatgactccaccatgtccatgatattcaccttcgtcagcaaaacagtacttacatctaaggttacatccatgaattacatttaaacaaatagcctttatgtaatctctatcatccatagagctatgagctatttcttcatattgatcttctgaatataaaattccttcttcagctaactcttgaatttcatcataagcctctgaaatctcttcttcatcatattttcctttaagttcctgtaatatttctttcttatttcttaattggctatcatctaatatatcataaactagttcatctacaacatgaacagctcctgtattcacatctaaaacaaaataattttcgccttgtttaaatttatgtattaaagacaattctttttcctcctaaacatataaagtaagcagtaactatatagttactgcttgaagattattagttttcacattctaagtttgcaactgtgcaagatgtcttacaagctgattgacatgaatttgcacattctttgcatcctggcttacataaactatttttaatgtttgttttgtttatagtttttatatgtttcattacaaaatcctccattttaaatatatccttagctattatatcataatatactaaagtataaaagatttgctggccctctttttatttatatttctgtttatataaaattataaatagaaatactaaataaactgtcaaaagttcttagctagaggttgttccatatttttttatttaaatcactatatcttcaaactgctaccacaatattactttcttgtcttatatatattaataaactcactaattaatattcttgcagcagtaccatcaataataatttgaaattgttcccttgtctctacaatgccacgtacactttctatcttttttaaaattccaacatccacttttttagtgtcctttaatctcaatcttaatctagtcatgcaattttctacacacaaaatattttcttctgatccaaccaaattaaaaagttcccttgctatcttaccaaaatctgtgatcatctctcttttcccccatccttcaattagcaatctataataaaaatagccaacactcaataaattaaatattaaaaattgctggcttttataactctattcagttttaaagtattattaatatctcatgagatgattatacatacatataaatgatttgtgtattatactaaagtataattttgatttaatttgtagcattttatattatacctttttctttcaattgattaattgctattgttttgtttctcacatttaacttgcaataaacagatgcaatatgttttttcacagtaactaaagcaatatttagtttatctgaaatctcagattgcttatatccatgatataccaatttcattatctcaatttcccttggagtcaactctattttttctaaattacaatatctttttatatatatctgattatattctttgcactttgggattaaacattttacatacgcactttcatttttaatagattcgagtaatggtaatatatgtggggctaattcaacaaaacacattacaatgtggtctttttctgctagttcaatggcttttagcagtgactttttggcaatttctcttccatatagcttggactttgcgattgaatcaaatatgtatgcatatattattccaaatatactttttttacccgtataaacttccaacataatttctacttggatttctaactctatgtaactccccttaagtatcatcgctaaacctgtgataacatggttcattcctataacaggcataatatcttttgattcatggctctccatatttttaatccacttatttaaattttctaaattaccagtgattccatcaatatatcctatagctatctgtgaaccgttaagaaatattggaatattaagattttcatactctttaatcagattatagaaattatttttaacctcatttttataatttttattcacacaaatccttgttaacagaaataatgaacaaattattatgcttgtctgtttttttgttttagctttatgaaatgccttatatgcaaacaattctccatttttagaatctcctgtttcataaaaatattcagccatcataagataatttgcacctgctgctccaccatttgatatatgaataaaataatttattccttgttgaaaaaattccactaactctttcaaattgcctacttttctgtgaaataagtataaaaaatgaggtgatccaaaagttgccggcattttattatttgctattctcgaaccccctcctttaaagagctcgtaggcctttttatggtactctatcattctcctaacattataaaagactaatatgctctccaaaaatgcgatttcacctagtatttgatttttatctttaagatttttatcttctatatagatagctttagcctcatacaataacttagcaccagctattctatttccgtaaagaatataaaaaaataaataagttaaataagctataggcctttttatcttctcactgatagtaagctcattaaaaactggttttataatttctttatataaattagtaagatctattgtataatttctctctattaaatctagtatacgttcgtaattcttagccttataatagtattccattgcatatatgtcattaaaatttttagcataccaatcaccacaaatattatttacttccattaaatctacatttgataatgctaattcttcttctaatgcatttttaaggattgaatgtagtctatatattttttccttcttatcgtatcttataaagcaattattggaacatactcttctaattacctccttggatctttcatcttccgtaatatacatggcttgttcgatcgtgaaattctcaaccaatgcgagttttaataaaatctgcttggtaacttcatcaaatttatcatatacagctattttaattaactctgttgcttttggtatattatcaaatgtattttgactgtaatattgaattaacgcaagatacatagctgaagtccatccaccagtatattcgtatagttctttttcttctacttctgtcaatattattccattaatcttaaagaactctatcgtttcatcaaaggtgaatgcaatatcctcctgacgcattatcatacatttttgctttagctcaaattctatatactcatttgccggcttttttctacttattataactatgtgcaaattacttatatcttccaatattatagcttttattaaatgattaatataaactattttttcatcatcccagtcatcaataataatgatggtttcttgccttatctcatttctaattatatctattatcttataaacatctttattattattaggaaccccgtatgcatataacatttcgcctaacttaaaattgatatttttaatcaaatcacaaaattttttccatatccacatatcatcaatttcatcgtttgttatatcaagccaaattgtttgcactcgtttattcttctctataaaatttctaactgcaattgattttccgtaccccatagatgctgatataaaatatacaggtactcgaaaaatttctagcaatagcttattaatgcgctttctatataatagtttaggtctgaaaatttcatttttcatatataaatatcccttcatttaagcaaatgtatgtgaaaactacattagaatattttatcatacttaaaatttcatttcaaatttaacctttactgttaaatttatactaaacctcagataaaaatctgctccgtaaactgtgtatttctaacactttcaaaagttatcagcagatttaacttcattaataatttcctaaagaaaaataaagttccaagcacttaaacttggaactttattaacggtatattaaagagcaactactttatttaaaagcatgttatttctctttataaattcatccatttcagctgcatctaattccttatttgcaattttagctaaatctaaaatatgctcacagataaatttaacatcttcttttttgctttcattcttagaaacttctagaagcttcttaattattgcactcttattgtttataactaaagttttttcttcatcgaacatacctgggaagctcattcctgattttgcatacatcttactcatttgagccattcttcttgactcttctgaaactaaaataagtgctggagtttcttcattcttcaatccttcaatagacaaattcttaattttgtctcccaatgcagttttaaatagctcctctatttccttattcaaagcttttatagtctcatcattttcatcttctttacttcctaatgtatctgaaatatcagaatcaattctcttgaatttaattcctgattcatgcatttccaagaacgaaataaagtgatcatctagtgaacaatctaatataacagcatctaaatcattctctttaaacatctttatatattgagattgttgtttttcgtcattagcataaaatactttgttttcatgcttttctttattggcttcaagataatcctttaatgttacgaattccccctttaaattcttaaagattattatttcctttatcttatcatagaattttggatctcttaagcaaccgtatttaataaatatttgtatatctggccagaatttattgaattcttctctgctatttttaaacaggtcaactaatttatctgctacctttttaactatatgattagatatttttgaaacttccttatcattttgaaggaaacttcttgatacatttaaaggtaggtctgggcaatcaatagtaccttttaaaagtaataagaattcaggtattacttctttaatgttatctgcaacgaagacttggttattatataatttaacttgaccttctgttgcttcaaattcatgagttaatttagggaaatataatattccttttaaattaaatggataatctacatttaaatgaatccagaacaatggttcattaaaatccatgaatacttttctatagaaatccttatattcattgtctgtacaatccttaggtgctttaacccataatggatttgtatcgtttaatggctttggtgcttctggttccactaattcttgatattcagttccatcttctttcttctttgtttcatatttaggttcttcttttggcttattttcatcttctaaatatatttctgtaggtaagaaagagcagtatttcttgattatttctcttaccttatattcttccaagaattctgagctttcatcatctatatatagtgttactgttgtaccccttgttgttctttcgctagaagatccaatttcatattctgttccacctgtacattcccacttaacagcttcagcgccttctctaaatgatagtgtatctatttctaccttagtagataccatgaaagttgaataaaatcctagcccgaagtgaccaattatatccttaccttcatccattttatctttatatttttccataaaatccgttgctccagaaaacgcaacctgatttatatattttttaacctcttcctctgtcataccaataccattgtctatgaatttaagagtcttcttttccttatttattgatacaacaactttgtattgctcatctccgtttattgctgcttctcctagggaaactaatctttgaaatttactaattgcatcgcatgcattacttataacttccctgataaatatatccttatcagagtatagccattttttaataataggaaatatgttttctgtgtcaattgatatgttaccattttcttttatcatgatattacctcctgttattttttctagaaaatattttaatgcaaagaatatttattgtcaaattcttcttataactttatcttaaacttatacattaatttaataaagaaagaatatatgttgcaaaatgtatttctaacataatagcttaaaactatcattttgatgcagtacaacatatattctaaattgtatattataatcaaaatctgattatatcttaaattttaacacaacttcattaagcttttgagatagttctgcttgactctgcgaagatttggcaatatcactaacagctaatgttatttcactaatactatttagtacttcttctgaacctgcacctgactcttctgctgtcgcagatacagtttgcatagcttgatttatttgttctataacttcatttatctgattagatgaagatgcaaattcttcagtcatttcattaacaaattcagcgtctttttcatattgaataccagtattcataagtaattcatagcctggctttacattttgagctatatagttaagtatatcttctccactctgagataaattttcgaatgcagcctgcacctgtaaaaccataccttgtatacttgaaactgcctctgatgattgttctgcaagttttcttacctcgtctgcaaccacagcaaatccttttccgttttcaccagctcttgctgcttcaattgctgcattaagtgcaagtaaattagtttgtgatgctatgtcccctatagcattagccatcaattttacctcattcactactttaccatcttcgatggcttttataatatttgctttcttttcctcataaatactgtttccttgttctatattttctgaagcttttctctttatttcaagagagcgactctttatttcccctactgaaacagccgcatcgtttgctctattagcgagttcatttgttgtcgctccaatttcttctgctgatgcacttacttcttcagttatagcactcaaatcttgggctcctttagatatttgttcaattgattcatttatatcattcatcttagaagaaacctcatgtgttgtagctgatagttcctgccctgatgaacttatatcattggatccatctattattacgcttattaatcttcttatgttttcattagctttatttaaggctcttgccatactgccaatttcatccttagagcttatctctatttcctgagttaaatctccttcttctaagtgctgtgcatataataatactttttttaaattatttgatatgattgtagcaattataactcctaatagaactgcagtaataaaacctaaaataattgttgttaccattatataaaaagatttattattgacattattatttgaagaacttttatctgatgccttttgttcagtaattttaactaatttatcaatattattagttaacttctctcttatgtttgcactttctttgctaaaactcatagcctcgtcgtactttccatcacttgctagacttattattttatcagatgaatttctataatctgttaaatcactttttatctctttatatattttattttcatcttcattcatatccgattgttcatatattttaaggatctcattgttttcatctctataaccatctatattacttattgtctggctaactttactagaatctttactatttaataaattcaaaatttctaatctagaatgtaatgtatttgagttaaaatcttgtagattttttagcacttggaaatctttttcatataacgcattagaattagaatttattttacttacactaagtattcctataactccaactactgcaataaatatagatattataaagaaactgatctgtaatttatattttatttttaaattattaaaccatctcacaccgctttccccctttgttgatatttgcaatcaactaataattcttattagaattttaacataatttacccatttttgcacttattttttgtatttttcactaaattccaaaaattaatttgtacaatattattttttattaaaacaattacaaataatactattgacattaacgctacgtaaaggtgtaaattaatcttgtaaggaggcaatcatatggaatatacagtgcaaaaactaagcaaactggctggtatcagcacaagaacgctcagatattacgatgagataggaattcttaatccagcgagaattaattcatctggatatcgaatttatagccaaaaagaaatagataggttgcagcaaatattattttacaaggaattaggagtagatcttgaaagtataaaaagtatgttgttatcaccagcatttaatactaccaatgcactcaaagagcatcgcgaaaagcttcttgcaaaacgcaaacaactagatatattaatagctaatgttgataaaacgctagcttcatcagaagggagaattataatgagtgataaagaaaaatttgaaggctttaaacaaaagatgatagatgaaaataaaaagaaatatggtaatgaaatacgttctaaatatagtgataatattgtaaataaatcaaataagaaatttcaaagtatgagtaaagaacgatatgaagaattcgaaaagttaggtattaaacttatggatacactaaaggatgcttttaaaactaatgatccttcaagcgagcttgcacaaaaagctgctgatttacaccgccaatggctagcttattcttggagcgagtactcaaaggaagcccatgcaggtcttgcccaaatgtatgttgatgatgaacgatttactgcctattatgataaggatcaacctggtctggccgcttttttaagagatgctatttttatatacactggaataaaaaaataattttataaatttaaatatatcagtgaaaatactattccaaaattaatagctgtcgattttatcgacagcctattaaatgattatactatatattataatttgattattattatctcaatttattgaattcggtttacatatttcttacagggcttattttttttgttatttattcaataccttttcaataaatacatttactaattcaggatcaaattgaattcccgaatttctttttaattcctctatagcaaattcttctgataatgcttttctataaggacgttcactagtcatagcatcatatgcatccacaatagatataattctcgattcaaaaggtatatctatatctttaatgccttttggatatccttcgccattccacatttcatgatgagaaagtacatactttgcaatttctgacatttcatttactgtacttaatatcctataccctatttccggatgacgtttgatttcattatattcatcctctgtaagtctatctggcttattaagaatattttcctctattgctattttgcctatatcgtgtaacaatccagcattttttaattcttggattttccttttaggcagaccaatattctttcccataagttcacacagctcagcgactctcacagaatgttgctcttcccttttatttttctcattaagagtgtttattattgtatcaatagttttacctctcatatttgaactttcaaaaagctttctcttatacatataatcttctgcttttatgaatatttcttgaatcatttcatcttcatagcatttagtttcataaccgaatgaaatagatatatccaaaccttttatttcctcccgacctttaagttaaatacatatttatgcaatatactttatagtatttcatcaattagttctatacgatacctatttatgaactaagatttatctcttcctttatattttctttattaatattaaatttcccaaccctgtcaggaatacagctaagtatatcatctagatcatttagtccccttagtttcattatagtagtttcaccatctctaattattaaaattgcatctagagatacacttacccctatacattcgccaatgtctacacctttcattcctttaaaaccatcacatttttctcccactattccgcaactaaccataacacttataataggtataagaattacttcttctaaaataaccggttttcctataactctttctgttatgaaatgttttcctgatttaataaataagtcatctatatcttcttttttagctctattatacatattgttccctcctagatttaatataagcttagtagtatttaatacctctattttaaatacttctataaaactatatatatttcaattcatagtatacatttcataattcaccattacgtctaaaattctcgtaatatttttagaatcatcatgaagaattatttttgtaatatatatcagcattttaatatttagtataatcggcttaaagataagcattatacacttaaataaatatattagtaattatttcccaataactcaaaatttaaatcttctctctgattaataaattttaaaatatcactatttttagcttctataacactttcatcctttgtaaaattttaattcacgaaaaataaaaaaaatatgacttagaagatatatttttctctaaatatcctctaaatcatattttattcctatattccaaaagctttttacttaattaaatctaattcattatttgcggtaaaattaatattatccaatcataggtaattatacttaatgtggaatcttatttttttaaataatcagtaaaacattttactatttggggatcaaattgagtccctgagcaccttttcaactcttttatagcttcttctttacctatagccttcttatacactctgtcattagtcataacatcataagaatccgctacattaattattctcgccattaacggaatttcttctccaactaatcctaaaggatacccatttccatcccatttctcatgatgtgttagtacacatttagcaacatttccaagttcgctagatgcatttataattctgtatcctttttctgtatgagtcttcattatttcaaattcttcttttgtcaactttcctggctttaacaatatatcttcattaacgcctatttttcctatatcatgtaaacttgcaactaatgctaactcgtctagctctgaaatttttaacctcaatttttttcctatttctaaagcatattttgttactctttcagtatgttcattggtttccatatttttctcttctagactttttttcagcgaatccataattgaacttctaatacttttcttttctaataatttttgtcgatatactttttcttctaccttgtttatgcagtcgtatatatcttcctttaaagaatattttattccttcacctaatgcaatgcttaattgcataaatttataatctgcttgttcgcatttttttgtgatttttctaataactttttcacattttgattcatcacaattaggtataagaattatgaattcatctccgccccacctaaatacatatccattaggatgacatatctctttaagaactccagctatacttctaagtaaatgatctccttctagatgtcccaaagtatcatttactattttaagcccgtttacatctcccattattattcccaatggcaaatattgctcatggtttaattctttaatcttttcttcaaaactatatctattatataagcctgtgagaatgtctatttcacttaagtatcgtaatctttcctctaaaatctttctttctgttatatctctagatagccctaccaatccccatacttgtccatctttatctacaacaggtattttaacattctcttcaattatttctctaccattctcattttgtatcctatgctcaaaataagtagccttttttgttaccatgattttattatcctgatcaatgaattttttcgcttcattgtagttaccgtatatctccaaatcagttttgcctattatttcttctacgcctctctttttataaaaatcttcaaacttcttattaaatccaagaaatctgctttccttatctttataaaaaatagattctggcactgcatcaattattgttcttaatatgtttttttgtttttctatttctgcttctcttaattttctatcatttatatcaattataataccagctacggctttaggctctccatcattatctagtatgggaaatataaaacactcaacacagttgtcatttactataccttctacaacataagtcttccttttccttaggcactcatttatttgctcatcatatagttttgctttctctaaaggaaaagcctctttattgctcttgcctttaacatcttccagttttatattatacatatcttcataatacctattaaagaatattattgtcgtatcaattccttcaatccaaaccggccaaggtatattacttaaaaatgatttatatatttcccctagatacttttcttccatcgcttcggtattccccttttatgctaagtttattataatttgattttactatctcttaacataattgtctaccgaagcaattattttcaaatattaatatgacacttatcacttgataattttgccaattaatatcactttatttctctctaaattcatttccgactatgtttttatatgctacatatgttgcatacagatatccaccataaacaataagcatcattaatgctgtcattaaaatcggttgtattttattgctagaccctaataccatcaagtatttatttactacagtaattccaacatatgaatgaactattgaaagagctagaggcaatacaaaaaatacagcaacttgtttaaatatacttttattaatcatgctctttgttgctccaatctttcttaaagatctataccttcctatggagtcattgcactgagataattgttgaagcgcaagtaccgctgcacttgacaatagaaatacaatgcccatatatactgctacaaataatattattgcagataatcctctactatcgtcatatgccatttctcttgtcccaccatagagactaaagtttaaatttttatattcattttcattgaacttaaaattattaaatatagtagttaattcttttttcgcatcttccttattatcacctacaaaatttaaatctagtacctcatcatatttatctattccatttactaaatcatctggtactactaaggtaaacatagcatcacttgaaggcgatgtggaaatagccccagtttcaatttttttgtcttttattttaaattccttattatctatctgtagtgaattctcatttttaataaagctttctagtaatccctttaagggctcataattagaacacactaatatctcattatcttttaaatctatactagattcacccttcaattttcttaatttattgtattctgaaattttaatcatatctgtagtatcaaacactttaaaatttaacatttctttttgatcgctagatagtgcatatttagctaatacatccctagaactcatattattcttatattgtctaatcacaacatagtcagcattatcatcaacattataatttaactgatttagtgcatctaaaactgaaattctattactattatttttatcaaatacttttactgatgcatcaaacggagtttggttttttaatgagctttctgaagcattttttacacccaatccagttgacaaagttcctatagtaacaaataacattaaacaaattattgtcatagagataaaattagtattaaatttactcgaaatttgttttatattaaaaacatttagaccatttagatataaattcttatttttcctaagtgcagaaaatgcaaccgatgcgattccataaaagaaaaatgctgttccaacaatccctaatgctattgataatttaaatctgctgtcatcaaaattcaaccctgctaaattaacaagataataagcataacctaaaacaataagtgcagctattaatataaatagagctatatacggatttttaatattaattttttcattttttctatctgcatgcaataagtcaattaatttatattttgaaactataattacattaaatatcataactaataagtacattatcccaaaatataatatagtcttaagtatagcacttattgaaattgaaaaactatatttggtcatttgcaccgcaaaaagcttagctgtgaatatagaaagaacttgtgcaaacaacattccaagtaaaagtcctgctgccaaggatattattcctatatataaagtctcaaaaagcaatatccgtgacatttttctttttcccattcctaaaatcatatataccccaaattctttttttcttttactaatcaaaaattttgtggcatatattattaaaccgcctaatataacagaaacgccaatagatataaacgaaataagttgcgccatcatcttaacatattccgtttgtccagaattcatatctgccattactgactgagaatcgattgaattaaaactatagaatatgcatactgcaaaagttaaagttaaaaagtaaatagtataatctttaaagctcttttttacgttattaaaagcaattctagaatacatcttttgaatcacctccaagtagtgtaacaatatctattatcttgttaaagaaatcttttcttgaatcttcgcctcttaccaattcattaaatatatttccatcttttatgaataatatcctatgtgcataacttgccgtaaacgcatcatgtgtaaccatcaaaattgttgcttctaattctttatttaaggtttcaatagaatttaaaagtaatttagctgacttagaatccaaagcccctgtaggttcatctgccaaaataagttttggattattaactattgcccttgctgatgctactctttgcttttgacctccagacatttgataaggatatttatctaatacttcgagtattcctaagtttttagctgaattccttactaattcatcgacttccttgcctttctttcctgcaatagttaatgctaatgcaatattttcatatgctgtcaatgtatctagtaaattgaaatcctgaaaaataaagcctaacttatctcttctgaatctttcaagtttcttacttttaagccttgtaatatcttctccatcaatcataattgatccggtagtcactctatctattgtagatatacaattcaaaagagtagtcttcccacttcctgaaggccccattataccaacaaattcacctttttctactctaaaacttatattatcaagtgcctttgtgacattatctttattcccataatatttttctacattttgaatgtttaaaatgttctccataatcttcctcctatttttatagcaacttttataatcgctattcagtccaaatttatttaacctcatgactacattttaaagcttttgatatttttctcatattgaaatatctttcagttaacttacattttcgtaagatgtagataacaatttgaaatattaattgaatttaattaaaaactgcaaataatgaatatcatttataaaacatttttatttctaatatcaaaaatagcctaggaaccaatctcctagactttctgtcttatataatttagaaatacataaattctactaagcctatattaggcataatcaaaaaataacaatttcatatgcctcacttaaaactcatgaaacctccaatagggaatattatattaactttagttcctttgccagctattgaatctaaagttatccccagtccaagcttttcacatagctttttacataaatacaatcctattcctgtggactttccatatactcttccattttcgcctgtaaaacctttatcaaagactctatttaaatcattttttgaaatacctataccattatcttcaatagttaatattatattctctttacctttacttgtgtaaattttaacttctccatttttatctttactatattttattgaattgataataatctgatttataataaactttacccactttggatccgtaaccactgccccataaatattatcaatacttactgaaatctttttgctgataaaatcacgcctgttgtttctaataacctcctgaattatgttctttatttcaaactctttgacaatataatcattcttaacatctgtacttctcgagtaataaagagcctgatttatatattcttcaattttcttaagttcatcttccaatgatttcttttcattaatattgctgttttctacaattaatcttgcagatgatattggtgtttttacctcatgaacccaagtttctatgtactctctatactccttttgaagatttctatagaagttaacatgctcatgcatatccctattactatcgcttaacacttcataaataacttttccttcataataatttggactttttattacctcaggtaataaatactttttatctaatttgccactaactcccacaatatcatcatagaatttttttttcactataaactcaatgattatatagattgatagtggtaaaaaccaaataataaaaactacaaatagtattacaactggtgttttagctatgctcattatagctgcaaataaagagtatattattagattaattattatgtatggcaactttgaaatagaatattcctttatattcatagtaatatataaccaattcctctcttagtctctattccatctttaaatccaatttcctgaagtttttttcttaatctagtaacattcaccgacaaagtattatcgtcaatataaagatctgaattccataaataatccattaaatcttctctgctaactatgcactctttatttttcataaggcaaagtaatatcctaaattcgttcttagtaagatcaatcttttcatctccaaatatcacgcttccattagagacatttaactttaaaccattgtgttcaactatctcagaaattgaattattccctagagttcttcttaatacagcagttatccttgcaagaagtatttgcgtattataaggctttgttacaaaatcatccgccccaagattcatactcataatctcatccatctcgctatctctgctagttactattattataggtatattcttttctttccttatttccttacagatataatagccatcataatatggaagatttatatctaacagaattaaatccggttcatcctttagtgctacttttactatattttcaaaattagctggtgcataagcttcataaccatatctttttaaaaactctacaagctctttttttatattctcattatcttctattatcatgattttaggcatatacatcctccttaaaattattgcttcatcgtcaattaaatataatctgtaaaatacctttaatttattatcagatcttattttagttatttctaattctagcataaaattcctaataacaaaaatgtatactaagcactaatttatttagtatagttttcattatttgcatacaaataatagaagagaataatctaaatgactaatttaaattattctctaaaattatatctctattcaatttaaggttttgacttatcagaaaaaatacttgcaaattttctaaagttttaagttcatatcttcactagaactcataaatctagatttaaagttagacatttgcaaatctattaattaggttatatctagtactctgttttaattgttctaacgcaacacgatattgtaaaatttattatgaaatatgttgcagctatagctccaaacaataaaaatatctgagatgatgaaacaaaacttcccataagaatcataccttttcctgtaaattcttctatcccaacggcccatagaaaagatgtatcttttattaccgtaattgattgggatagaactgttggaatgcagcgcctaaagctttgaggtagtattatatatcttaatgtttgaaacttcgtaaaaccttgagaatatgctgcctcatattgacctctacttacagaattcattcctcctctaaatatttctgccataaccgccgaagtaaataaagtaaaagataagattcctgaatacatcggttttattggaaccaaaaacctaatagataatatccatagtaaattaggcgtatttctaaatgtctctatatatattgttgcaattctccccataattcccttagagaaatttcttgatatggcaagaattattccgaaaaacatactcaatacaattgatataatggctataattagggttaatttcatcccttgtaaaagaaacatcatatttgcttgattaaatacacttgacattattatagccctccctctgttgcaacggattgttctgttatagaatcttcaatatcaactaatgctttctttttctctctaagttcaagctttcttgaaatcattgctaatggataacacattataaaatataatgctccagttataacatacgctggtccatagtacatattggcacttgaccaagaatcagctgtatacattagatctccgcctgcaatcattgctaatactgaagtattctttattagatttaccagttgattcgcaagtggtggtattataatctttacagtttgaggtaatattatatacctcatagtttgagtatgagaaaatccttgagattttgcagcctcaaattgtccttttggtattgatgttataccagttctcacaacttctgatatatatgctccatggtatacaccgactccaagtattccaattaaaaacaccggtaataccacctttatatatggtaatccattaaatagaaagaatacctgaattacaagaggtgtattctgaatcacctccacatatattctatttattaccttaaaaatttttattttgcttgtagaaagtactccaaaaataattccaagcattaaggcaagtataagccctagtattgatacttcaagtgttgttaagaatccctcaagaaatatattaaaatctttaaaaagtgcttcccacttaaatattgcaaaaggtccgttcattacttaatatcccactttgcaattaatttatctagttcacctgaactcttcatatcatttataacttcatttacttccttcgcaagttcagtattatcttttttagttgcaataccatattcttgaggatcatatctatcatttaatattactgttgaatcatcaacataaccattcaaaatagatgcatcaactgcaaaacaatctattctgcctgaatctaatgctgccttaagttcaggatatccaccaagctcagaaaacttaagagttattccttccttttctgcttctttttgaagcgcagttttagttgtagcactttgagcaactccaatagtctttccatctaaatctttaagtgaagacgcaccaaggcttttcttaacaagtaatccaactccatcctttatatatggatctgaaaaattataactcttttttctttcatcagttatagtaaatgtagcagcaaccatatctatttctccattatcaagaagtggtcctcttgttttagctgtaaccccttgaaattcaactttactttcatctcctaatatttttttcgctattgcttttgataaatcaatttctaagccttccatttcacctgtctgtggatttttgtaaccatatttaggtacatcaacttttaccccaacctttaatacgcctctatcttttattgcttgtatttcttttgcttccgcagtatttcctcctgtatttgttggtgttgatgagctacatccagccatcatcatacatacacctaatcctaccgctaaaaataattttctcaatttcatatatttatccccctatttaaattttttaaaacttcatagaagttttcattaattatgcgttatgcactgtgaattatgtttcttatcttataattttatttaagaacgctttggccctatcattcttaggatttgaaaaaaattcttccggatgagcctcttcaataatctgtcctccatccatgaatacaattctatccgcaacttgctttgcaaaacccatttcatgagttactacaaccattgttatattttccttagataatcctattaacacatccaatacctcttgtatcatttcaggatctaacgccgatgttggttcgtcaaataacattattttaggatgcatattaagtgctcttgctatcgctaccctttgctgttgtcctcctgataattgatttgggtaagcatcggccttttcctttaatcccactttttctaaatacttcaatccagattcctctgcttcttttttacttaccttttggagttttattggtgctaaagtaagattctcaagcactgtcatatgtggatataagttaaactgttgaaaaaccattgcagtagattgtctaactttagctaaatcttttttcagacttaaatcatattcgtctatgactactttcccagatgtcggctcctcaagataattcatacatctaatcaaagtagattttcctgatccactcggccctattacgaccaatttttcaccttcatttatatttaaattcacatttttcaaaacatgagtatctccaaagttcttgactatattctctaatttaatcatttattctccccctattttggcacaatattaactcaatagaaatcaatcaacttttgctttattaatttttattcgatgattctgtttatctaatatttctatttcaatagtaatttcgactctgtaaattttgaaatacaaaaaggagccctggcatatataccaaagctccattgcttttttaaatctttattaaattatatatttttccacttccctagtcaatgaattttaacatactgtgttttctgtagttttctgtagtttatatatgtgttaacctagaattttattaatataccctcaataaatttttttgtatttatttttccttgactgtatattggattttttaaatgcttgatttcctgtttaacctgctttatctcaaaaagtgatgctgaatattctctatatatgctattatcgctatcttcacttcccaaactagctattgaatccatagccttcataatagttcttcttatacgttgctccatagatctgcaattaatagctgctaatgaatctccatatagaactcgtgccacatccatataaatctcttttagctgataaggtttagatggattcattttctttttattaatgatattcagtattacgagttttaattcttctattcctgcagtgccaataatgttaatatcagaaaatatgcgcaatagcttttcttcttgagaataaatttccacttcattctcaacttttttatctttctcaatgttgccctcaaaaactacacttttaatcattgatatagatttttctaattcaatctgttttttagcattattaataatgctaattgtttcaatcatattaattggcttgttaatatagaaaagtattccgcttttgtaagcatttgaaatcatttttccttcttcaacctgggataacattatgatcttaccagtatatccactgttaaatgtccttttcacaatttcaattccatctacttctggtagtagcaaatcaattaatacgatatcaggttttaatttcattatttgatctttggcatcttttcctgtcgttaaaatggataatacttttccaaagttattttttttaattgcttgctctaatattttacatactgccatatcatcatcaataataacaaacgttgtttccataaatagcccccttattatgaaaataatttatatactagataacggtattttcactaaaaacttagtgcccctatcaatatcactttcaacttctatacttcctcccaaattctctaagagattttttacatgacataacccaatccccgtagacatcgcccctgtctcctcattgaattttgttgaaaatcctatattaaatatatacggaagtacatctttatcaatacctgtcccattatctgaaacatcaagtagtaattctttttgcgaaatttccccaatcacatttatcatattatcaccactgcatgcctcaattgcgttaataattaaattatttagaatagcaaatatatcataatatctttttatcgaataatcttcttctagcttgaattttataaatatattagaatttacattatctatttgtctttttgtattatcagatattatgcagaaaatctctgacatagacatgtactccgccttctcaacattttgtactaattgattgattcctctaagaacccggtcattatttttacggatttcatgagcattttgtgcaagtgataacgccttaactgaaaattcttctttatccttattcatttcatacaaattgtaagcttccctcattatagtatttaaatcatttgttgatttttgtaaataaaaagcctccgcatatatttttgacaccattaaatttaattcagcataacgtttttgatgctctagtgtcttaatatataatttttgatatttatatattaaaaaagctgaacattgtataaatgctctaacaagtgctgttactataataacttttatagttgatatagaaaacatatttctaacaagtatttctgctgtgttgcatattatatcaaagcttattaatgacaagtataaatgtattatagacttatttctcctagttagtggaaatatagttcctaaaataccataaataatataaaaaatagctgccggcataaactgcattataatatcatttgaatagttagaagatgacattaataatccaatgctacgaatagaggcagttatagttcctgtgattattccgattaaaacaggatatatattttccgatatagaaaatataagcccaattacaatgactccaactcccaaaacaaacctactattaaatggataaatatatatttgcgccaaaatactgatcagaacagaaaataatacactattctttaaacaaatcttagttctctctgtcattttaattttatacatcattatatttgttccttcaccatataataaaatccattattgctctataatttatttatagaaaataatacgcttagattatcatcaagtcaattcaagtttttacgaattaaaatattaatcttaaaattgctattgaaataactcctgttaatactgttaataataaattatttttcttaagagcaatcagtattgttggtattgtagcaagcaattctggagattttccttgaagtaaaaatttattatcggtaataaaaagttctgccactattaatgaagctagtatagatataggtatatatgtcaaaaactcttccactttcttatttaattttatctttgataatatagttattggtaaaactctcggcaacatagttacaatacaaccacctatgataacactccatacataagaattcattctttaaccaccaccccaattaaagcaccagcaattgctgatataataacgccaatactagtagatacatatattgcacttactattaacactatggaagatacaataataattattaaagcttttcttatctttacatttccttttacagatgaaattagcaatcctataaacatggctgttaatgcaaagtctaaccctaaagccttataatctggaataaaaccgccaataagaacgccaattcctgttgcaagaatccaatttatatatgcagtaatgtttaaacccgtaatccataaattattaattttcttattcctcaacccctctgctgatgcaactacaaaagtttcatctgttaaaagcatccctataaaaaagttttttaagactgaattttctttgaaatatggagctactgacgcactcataaacaaatgtctaaagttaacaaagaaaatagtaaatattatactaggtattggtgaggatgataaaatcatactcgaagctataaattgcgatgatcctccatatataaaagcactcatccccattgcttcccaaactgtcaaaccacaagatttactcaaaattccacatgcaagccctaaacttatgtacccaaatatagttggaatacagtctttcactccctgaataaaataatacgagttgtttttattctttatttctaaagaatcatttggtattttccccaattccataaaatgcccccttgatactttttgtataaaaacgtaatatatattatatgcattgtacgttatactttacattacgctatatcttacatttgtactttatatttgtcaaggagtgaaaatatgaatttaaataatattattgctgggaatttaaaaagattaagaaacgaaagacaattgagcttaggcaaactttctgatatttgtggagtcagtaaagtaatgctagggcaaatcgagcgtggggaatctaatcctactattaataccatatggaaaatcgctggcggacttagggttccatatacatcccttattgatgaaccgattaaaaatgatcttttaataaaaaaagaagattctagacaccaagaatctcctgataataaatatagagtttattgctactttgcaagtaattcaaatagaaattttgagctttttactgtagaactagatggcaatagcacctacgaatccaattcccatggtgaaaaaactcaagaatatataatagtttatgatggtgagctatctttaaatgtggataacataacttatgttctaactcctggtgattctatagtgtttgattcatccaaaccacattcatatacaaacttaactaatagcatgataagaatgactataattaattactatattgtataggctagaagattaccaaattacatttgccagatacaaaattattggtatagtaattaatgatagtaatgtgcttaagccaaccaatttagctccatactcataatctcctccatacatctgagaaaacattgatactgtgagccctactggcgtagccatagctattaatacaactttttttatttctattaaatatggtggtaaaaatttaaataatatcattattataactgggataacgataagttttataaatgccacaaaataagcatgtttatcattaaatagtgtaatcagttttgacttagcaatatacgtaccaagcaaaatcatagcaataggtgtattggtttgtccaactaaattaaacgcatcataaaaaagctttggcagctttactggcgaaataaagacaagcaatccgaatgccacagctattattccaggattaaataaaacactttttaaggtaattaaacttttattatttgatactgtatatattccataagtgtaactcagtatattaaaacaaactaggtatgctgataaaaaaaacaccttttctatccccattatgctagtaactagtgggattccaataaatcctgcatttgcaaacccaattgcaaatttatctattctctgatctttcttaaaaataatttttcctataagaaaccctattaacattgcacataaagaaacaaaaaaagaaattcctagctcctttaacttatctacagaaaattccatttgatagcgtgttaacataatcatcggattaataacccagactaaaagattagatatttgcttggctccatcgtcattaattaatttcttacgatagactataaagccaattgccatcaatatatacatgatgctcacttgtccaactattgtaaaaataatctccataatattttatccttccgttctaaaaataactttaaatacatacgtctctatatgataattcattataaactaaatccttccttctgataaaatattatatcaattacttattttaatatacaagttttaaaaacaataaatttaaatattagtaagctagccacatttatgactagcctattaacatttaaatttgcttcgattctatactaaattatacattatattattaattcataaactaagtttataaattcaacattattgtctcaaacatatcacttagtgctacctgactatctgcaagacctgcctcgaatactacttttggcattccataaactatacatgattcttctgcctcgactataacatatccattattatcttttacattctggcagcctgctaacccgtcattacccattcctgttaaaattacagagactagcttatctttaaaaataggcgccgccgaatttaaagtaacattaattgatggcttgtataggctgtccacatttttcatatcctcaactttgaaaactatgctattattctcacttttttctaataatgtctgaaatcccgctggtgctatatatatttttcctcgctcaagtatatctccattctctacttctttaacatgtagattacatatagtatcaaatctttcagctagcggtccagtaaatcctggaggcatatgctggattacaataactggcctgcataaatcctttggaaatcttggcaatattgattgaagtgcggatggtcctcctgttgagcacccaataataagcagctccctcttcatgagtttttcaccacaattaatctgctgtttatcatatttaatattttctaaatctgcattactatcttctttattcttttgtaccttactactgtctgcaattgcttttagtttactaagaaaatcatttattgtttcctcttttatgttctcccctactaatgaaccttttaagaaaatatcgattgctccgagctctaaagcctttagtgctgtcctagtaccatcttccgtatgattactcagcatcacaactggtacagggcaagttttcataatttcttttagggcacttattccatccatttctggcatttctacatccaatgttactatatcaggttttaatctttgtatcttttctattgcgtccaatccatttctcgcgattcctattataaaaaattgaggatctttttctataataaggcttatacatctcctcataaaggaggaatcatctacaactaaaacaccatattgtttcatcatgctttctctcccttcttataataaaagatcgatggagtataaacagtatcaaagcctggattgacattagtaactgtttctgcatggcctaaaaataaatatcctgtttcattaagaatattgtaaaacgaaagagcagcttttttagtaaattctgtatcaaaatatatcaaaacattcctgcagagtattatatcaactcttccaacttcttgttcgatatttttatcaaacatatttaaattcttaaactttacaagttttcttatttcatccttaaccttgtagtcatcttcaattttatcaaaatatttatctaacattccataaggcatcttcctaaaggacaaagatttactactgtatactcccttctcagctttatctaatacttttttattaatatctgaggctattatttcaacagaacttttttcaaaaagcattgtttcttttattaacattgctaatgtatagggttcttccccacttgaacatgccgcacaccagattctaaaagttttttcctttgaatagtcttcaaattttggtaaaatattagtttgcaattctcttaatagattttcttctctaaagaaataagtttcatttactgttattagttcaattaatgtatctctttctttttcttctattttaacgtacccgcaatattcccaaatactaagtctaagctctttaattctataggttatcttactttcaagtgaaggaagatttttggagtagtcaatgccacagaattcatatatataacacgccaattgttctaatgccataatactcataatttaaaatttcctccttatatttaaaaccacaatttattcttttaatatataagttgctctaaatattttaaaatttagaattactaaattctaataattagccttaatataattttcccgtagcaacttatatactcatatagaatttattatctagttattcaactaactcctctaatgatttttttatttctaatgtatactcagaaagttctctagtaatacttgaagttttttgaacatctcttacatttaaattaaccacattatttatatcttcaatatgttttctaagctcttcaacttctcttgcctgtaccttagtagccattgttacttcacttgcttgttccgtaacattcttaaagttatctgtggttctatcagtagattttgtttgttcattcatagcccaagttatctgcttcatatcttccctagaacgtcttacaccttttataatattttctactcctgatgcctgctctttagatgcctcagtaacttgttgtgctactcttgtaacattttctgctgaatttacaatattctttccttgctttgcctgctctttcactgctacagctatttgtcttacttgctctctagaattagttattcccttaactacttcttcaactcctatagcttgttctttcattgctcttgttacttgctccgactgttctgctacattttctacagaaactacaatgtccttcccttgtttcgcttgttctttcactgctactgttatttgtcttacttgttccctagcattttctattccttttactatttcaaatactccagctgcttgctctttcatagcttgtgttacttctgcagtttgacttgtaacctctccgactagcttaatcattgattttccttgtattgtctgtgatatcatagcatcagttacctgcttaacttgttctcttgcatttactacacctttaataacttcatctactccatttgcttgttctttaacagctgtagtcacctgtgctgcttgatttgttacattttctacagaagcaacaatattttgaccttgtttggcttgttctttcactgccacagttatttgtcttacttgctctcttgcattaactattcctttaactatttcttctacacctattgtttgttcattagttactactgctatttgagcagcttggtttgttacattttctaccgctactacaatatctccaccttgttttgcttgttcttttaccgcaagcgttacttgtcttacttgttctcttgcatttacaactcctttaattacttcatctactccatttgcttgttctttaacagccgtagtcacctgtgctgcttgatttgttacattttctacagatccaacaatatcttgtccttgttttgcctgttcttttactgctactgtaatttgtcttacctgctctcttgcattcgccacaccttttattacttcatcaattcccgctgcttgctcttttactgctactgcgacctcatttgtttgattaaccacattttctatagacaaagcgatattttttccttgctttgcctgttcttttactgctactgttatttgccttacttgttccttagcatttacaacaccttttattacttcatctacgccagctgcttgttcctttactgctattgtaacctcatttgtttgattaacaacgttatttatggctttactaatgtttcccccttgacttgcttgttcttttaccgctactgttatttgtcttacttgttcccttgaattttcgataccttttattatttcatctatgccaataacttgttcttttactgctattgcaacttcatctgcttgatttgttacattttcgacagctccaacaatattttgtccttgtttagattgttcattcattgctatattaatttgcactacttgttctcttgcatttgctacaccttttattacattttctacacttatagcttgttcccttgtagcttgtgtaaccatagacgcttgattagtaacatttctcatagattcgagtatttctttacttcctttattttgactgtcagttgccagagttatttctttgatttcgttagtaacattttctattccaccaactattttttctattacagtcccaacttcattgcttaatcttgatccatattctactttctcagtaccaacttctatcgccttaattgcattggtagtttctccctggattcctttgataagttcagatatttcctttgtagctgtagccgttctctcagctagttttctcacttcatcagctactaccgcaaatccttttccgtgttcccctgctcttgcagcttcaattgctgcatttaaagcaagcaaatttgtttgatctgctatatcatctattacatctataatgcttccaattttatcagaactctttcctaagttagttattacactttctgctttatggataacctccgatatttcacctatagcgactaatgtattagctacagctatttgtccatccttaacatctgatttcactacatcacttaatgaatttacattttgagcattttgagccacttgacttattgatgccgccatgtcctcaaccgtcttataagtttcatttgaagctttttgcagttcttcagcattaccagctactccttgaatagattttcccatttcttctatagacgcagatatttcttctactgatcttgtagtactttcactatttcctgctacttgctggatagatactacaacctcttgaactgcagccgcagcttcatttgcagaacctcttaaactttcggcatttcctgctactcccctaactgatttacccatttgttctactgatgacgatatttgttcaactgaacttgctgtgctctcactatttcctgctacttgctggattgatgctaccatttcttgtatggccgctgctgattcatctgttgaaacttttaaactttctgtattagtagctactccttttattgatacacccatttcttcaattgatgatgatatttcttcaactgaacttgctgtactttcactatttcctgctacttgttggattgatgctaccatctcttgaactgcaactgatgattcttctgtagatccttttaaattttctgcattacctgctactccttttattgaagctcctatttcttcaattgatgatgatatttcttctactgaacttgccgtactttcgctatttcctgccacttgttgaatagaaactaccatttcttgtactgcttctgtagcctcttctgctgatccttttaaactttcggcattttctgctactccttttattgattttcccatttgttctattgaaactgatatttcttctactgattttgctgtgctttcactatttccagctacctgttctattgaagctactatttcttgtactgcttctgtagcttcttctgctgatccttttaaactttcggcattccctgctactccctttattgattttcccatttgttctattgatgatgatatttgttctactgaacttgctgtactttcactatttcctgctacttgctgaattgatgctactacttcttgaaccgctattgtagattcttctgcagaacctttcaaactttcggcattccctgctactccctttattgattttcccatttgctctatagatgatgatatttgttctactgaacttgctgtactttcactattttttgcaacttgttcaattgatgctacaattgattgcaccgatgcttctgcattttcagcagtatccttcaatccctctgcattttttgcaacaccttgtattgattttcccatttcctcaatagatgccgatatttgttctactgaacttgctgtgctttcactatttcctgctacttgctgaattgatgctactacttcttgaattgatacagtcacctcttttgctgaagaagttaaactttctgcatttccagctactcctttaactgatttccccatttgctctactgaagaagagatttcttctactgattttgatgcgctctctccattccctgctacttgctgaattgatgccaccatttcttgtattgattctgaaacttccttagctgatccagtcatttcttccgcatttcctgcgaccactttaattgatttacccatttcctcaattgaatttgatatttcttcaattgaacctgatacactttcgctattacctgcgacctgttttactgatacagctatttcttcaagtgatctttgcgacttttgagcaacattcgttaattgctctgcatttatcacaactccatttatagatttagacatttcacttgtaagagaatttactgatttcacagcttctgattgatcaattgttccttttttaacttgttcatttatacttgataattcttttaatttctcatcaagttttttagatacaagaactgtattatctacacttcttaaacctcccataagcttaattccaatatttcttttaaaactacccatttatatacgcctccacactttctgatcttttgcttattgaatctcattgttactaaaattatcactatcttttgtatttttgttactaatcattcttgatattcctactacatcgaatatatgagcaacacttccatcaccaagtattgttgcacccgatatcccctcaatttttcctatgtaagagcctaagggtttaactactatttcttgatttccaactaattcatcaactacaacaccaaatcttttttctgcaatacctaaaaccacaataaatatattcctctttttattttctctaggtaacttaaaatagtcatgcaaccacaccagggggtggactttgtctctaatcacaacaacagattgatttttaatatattcaatttcattctttggttttcttactatctcaattatgttactcattggaagagcataaatttcattatgaattttaactaataaccctgcaagtattgcaagcgttaatggtagtttaatcgtaaatttacttccttctccctcttttgtttctacatcaataatcccatttagtttatctatatgatttctaacaatgtccattcctacgcctctacctgaaacgtcacttacattattagctgttgataaccctgtttgaaaaataagatttattatctcttgttctgataatgtttctgcttcttgagctgaaattacttctttcttaattgctgattgctttatcttttctaaatttaaaccagcaccatcatcttcaattgtcacaatgacatgattttcttggtgaaatgcctttattctcaatgttccttttgaaggcttatctttgactatacgagtactaggtttttctattccatggtctagagaatttcttacaagatgaatcaaaggatcagtaatatcctcaattatagttctgtccatttctgtctctccgccctcaagaaccaactccacctcttttcctaatgaattagcaagatctcttactagccttgggaatctactaaatagctgttgcactggcaccatacgagctttcattatgctttcttgaagttcactaactactcttgatacacgacttgatattccaattaaatcttcaactgaatcatcagctatatatttgttatgtaaagtattgcttacttgagcaattctagtctgttcaataaccatctctccaactaaattcatcatatgttcaagacgttctatatcgactctaatagtttgtgataattttttttcatttttaatctcttgtataactttctttttaccatttatctcatcaattttatccgttactatttctccttctatcttagctatattttctatatctttagtatctatcttttctttatctaattttgtaaattcataatcaaatacattagcatcatcaacatccattaattcatgcttaattcttgactccagttcctttattcctaattccgaaattaataaatattttatagtagtaatattttcatcttcatccaatagttctaatacattaggacttgatcctatgacctctcccatatcatttagcaaattaagtataagaaacgctctcgttgctttcataagactatcctctgagatcttaatctcacaaacaacacaagagcgcccatttatcttttcattttctattgtatatcttttatcatcatctagctcaaatactatcctcttattgtcaacttcatgactaatttccctttttactcccataaattgattgacttcagttttgtctacatcaatactttgtatacacctaagttttcctatgatatcatcaatatctacttctgtatcatttttatactctataaaatctctttttaataaagttaagcagtcagtacattcaaacaaaacgttaattattggcttcgttacttccataaaattattcctaattttatcaagtacattttccatctcatgagtaagcgatttcatcttttcataccccatagctgaagaggatcccttcaatgtatgtgctaccctaaaaatatcttgtataactttactaacttcatctttcttttctaattctaaaattccttgttctaaaagttgtatctgctcttccacttcatccaaaaatgcacttaccatttcaggcatttcatatatattagacatttcacaccccctaatcatgaagaactatatctatcttcaataagcttatcactccattttctgtaattcctattccttcaaagtactctccatcaatacctgcaacaacttttggagttggttgaatatcattgaattgtatgactgaatcaaccttatccacaattataccaatcatttcttctctactttttaccactattattctagtttctttagttctagcgcattctattagtttaaaccttttatgtaaattaactaccggaattacctttccccttaaattaataacgccttccagaaagaatttactattatgtgttggagatatttgctgcagcctaataatttcataaacatcactaatcttaagagcatacttctcacttgctaattcaaaagcaatatgttgaatatccaataaatcattcatataatcttcctccacaaacattctagtaaaattcactataattttttaaagtatcaactaagtaatcttctttatatggttttataatgaatcctctagctccattaattatagattccaagaatccttttcgcatccactcctccacgcacaaatttctttatattttttactttttataatttaattttatatatattttaaaaaataacactttattatctttactataaaaaaatattaatttctattaattttatattataatttttggtcttatttgtcaataatgatattatattgtttaatataataatatattgcattaattagtattatcatctaataatttttatcaaattatataatgaaataatctttttatattaaaattttattttgccctttctataaacttctacaaaaaaacagactcaaagtagcttaaaatctacttcgagtctatgtttggcgaaaaatactctatataattgtcaacttatattctatttgctttttttgcattaataaaagttttcatctagatatactaatattctaattttattatctatattatttccaaaaatggaattacgattcgacatatacacagtatttttttaagttttaaatttcctcattcctatattactaactgttatacaaatatatcacttatatccaagtcttttcttcttgaaaaatcaataagttcatcattaatttttacaataggacttagtatatcatttggaggtatatacatgatttcacctatcctaccatcctcaagctttgccttcatccctatataatatggacttatattttctaaaagtgtaaaaataactgaagtatcatacaatttcatcccttcagtcaaaaacatttgaaatgttttaaatggtgttacacctttcttgtatactctgtttgatgtcatcgcatcaaatgtatctgctgctgcaacaacttttgcatttaatgtaatatctatacctgactttccaaatggataaccagatccatcgattctttcatggtgcataagtattgcatcttttatatttctactaaaataattataatcatttattatatcatatcctaaaatagtatgtttcttaatttcatcaaattcttctcttgttaacttacttggcttgttcaaaatttcattgtctattttaatctttccgatatcatgaaggagtcctgattcaataatttccttaactgtgcctgaagataaattcatccactttgctataagcattgaatatatcgctacatttatacaatgcgtataagtatattcatctgcttcctttaacgcaactaaacacttaattatgatgttaggctcatctaaatactttattatggatttagatattttagaaatactctcagcattcattttattggttgtaatcaatccacttattaattctttaatattgaatatacttacatcataatcctcttcaaattctttaattttatccatattacttttgcccaagctattgtttccttccgaaacatagatataagcactatattctccaagactaatcaatttatctattatatatgaattgagtattgtattcttagacgctaattttaaaccattacatattatgtcctcagccaaaatcatgccaggtttacaattaaacaataatattttatgtttcataaaattaatcacccctatctacctacattaaactttatcatcaaataattcctttttcaataaaacaaatataaatatagtatatttttccttatattataacataataatacattatataacctcaaatttaagatctagtaattgtatttatcattaatacacgttagtaaaagaagcctccaaaacaatttatcaatcattttcaaggcttctttgatttattttttatattctgtatttaagacaacacgtttatacattttctatttagtactatgaaaaactacttttctataagtctcaaatttaacccatttatttaagaaatctcctagagttttctcgttagtttctttatattcatttaagaattttgcaacttcctcattagaattcaccttaacttcaaatcctctgccattaataactggaacttcttgatatttataatcgccaatagatttaatatctgtgattttcttatcacgtatttcaattgctactgagtcacgaagaactagtaaatcaaagttatctggatatttgtaactatcaccctctattggaagttcatcgcctacagtatatgttttatcttctggtttatatttgaatatagataaagtttctgtatcataatagaattcttcaaaaatgtctcctcttgcttttaactcattatgctcaaaagcaaattttgcatttttagcatcattattatgaacatcttctataacaccacaagctgatgtcatattagtaatacgatctattaaaataagttctcctaatgttttatgttcattgaacttatcaacaacaatcttttcagataataaaatatcacatgctgctatttcattttttgttaaataaccagttggtaaatgctctcctgtgttgacatcaattttatattttacatctgtaacaacaccagtcaacatcttagtacctactttaacaaagtactctttaccagctgttaattccgagtcatccatccaaagaatcttggcactaattaacttacttgtagtaatatctgttccttttgtaagtacacaacctcttgatacatctacttctttattaagctgtattgtaactgcctgtccttttcctgcgctttgcgattccttatctgtaatatgaatgctttttactagtgctttctcattactaggaagtgttgtaatttcatctcctacagcaatacttccagcttcaatctctccttggaaccctctaaaagtatgatttggtctacatactctttgaactggcatatagaaaccttcttctgacttactatcaatctctacattttctagatatggtaaaagcgcttccccttgataccatggagtattttctgacttcttagtaacgttatccccttccgtagctgatacaggaattaagtgaaaattttctaatgaaagttcatttactaattctttaatttgctcttcaatttctaaaaatctttcttcactgtaacctactaagtcaatcttattaactgcaaatacaaaatgttttacacccatcaaagaacaaattcttgcatgtcttctcgtttgtactaatactccttgctttgcatctattaatataatagcaagctctgcaaaggatgcgcctactgccatgtttctagtatattcttcatgtcctggagtatctgctactataaaacttctattgtcagttgtaaaataacgatatgcaacgtctattgtaattccctgttcacgttccgccattaaaccatctaataatagagaatagtctattgctcctcctctgcttccaactttactatctaattctaaagctttttcttgatctgcatataaaagctttgaatcatataaaatatgtccaataagagtagatttcccatcatctacactaccacatgttataaactttaataagctcttcatcttagaaatacccctctctctttcttctttccatactacctgctgcttcactatctataactctagttgttctttcagatgatacggcactaagggtttcctcaataatcgcatctaacgtaattgcatctgattcaaaaccacctgttaatggataacatccaagtgttctaaatcttatttttttatgttcaaccttctcaccaggtaatagctttaatctatcatcatctaccataataatattgccatcacgctcaatgcatggtctttcttttgcaaaatataaaggaactatatcaatattttcacgctttatatactgccagatatcattttcagtccaatttgaaattggaaaaactctcatactttcacctttatttattttagtgttataaagcttccacatttctggtctttgatttttaggatcccatgcttgcgcttcatttctgaaagagaaaattctttcctttgcacgagatttttcttcatcacgacgtcctccaccaaaggctgctgtaaatccatatttacttaatccttgttttaaagcttgtgtcttcatgatatcagtatatgctgatccgtgatcaaaaggattaatcccttgctttataccttcttcatttgaatggacaatcatctcaattcctaatttttctgctgtcttatcacgaaattcgatcatttctttaaacttccatgttgtatctatatgcatgaaaggaaatggtggcttttcaggataaaatgctttcattgcaagatgtaacataactgaactgtctttaccaattgaatataacattactggcttttcacattctgctgctacttctctaataatataaattgcttctgcttctaatttgtcaagatgtgataattcgctcatatattagtccccctatttgctaatctaaatttttaaatatatttattgtgaatcgtgaattgtgcattaattctaatattgatttgaatctttacggtttatttcgatagaatgctctgttccatcagtttcttcaatcttccaatctgcaatatcatctttaaatttaactgtaagcttgcttcctcttccacccatatctgctcctagatataatgaaattgaacctgtagggcattcttttatgcaagaagagcatccccaacaatctttaggatatcttatatatactttcttgctatcttcagttgattttataagacttcctggacacacagctaaacatcttttgcatcctatgcatttatttttattaattgctatgctcatatgtttcacctcttcccactaaatctctatataacattttaagtttgccatctacaagcttcgaattaacatattttaaccattcatcgcttttctctggataatcaaggttttctgcaaagctgtgccatctagtttcttttcttgcttttaaatgggcaattacagatttacaaagagtaagtctctcttttaactcatatacaaacatcaattcatgcatatcttctgcataaagattttcactcaatttctcaatttgctcaattttctccattgcaagttcaagttgcttttcattaaattgataactacttccaattccgcctgcataagtatccattaccttctgcattgcttcttcaagttgttcaaaattgaatatctgattttcagagtttagcactttttcaacttctgatttctttttctttataagtaaatcttcttcagttgttgataaagtaacaacatctttatcactattatttattgcttcaactactgcctttgctgcaatctcgccctctactagtgctcctgtaacatatttttgtggacatccaccagctacatcacctgctgcataaagaccttttattgtagtttctcttttggtatcaacccaatatccactagcagtatgtccacctactatgtatggttctgttccttcaatttctacattttgctcacttggattttttcctgattctatccattttaaagtttgactaggagccatgtttaaatatgctttttttaattcttcatcttgagcggaagtaataccttctgttcttaaataacaaggccctcttccctcttgattttcctttactgttccataaactctttctgatgtagttagaccatattttgtttcataaacttctccttttgaatttacctgctttgctcctacaccttgagcaattgtacccgttggtgcaattgtgtctttacatctcaaagcaataaatctcatttcaaaagtagtcatttcagcccctgcttttattcccatagcataccctgcaccagtgttgaacggaggataccacattttatgtcttgaaaaacctggattgttaggtttataaagacctgctgctccaccagttgcgcatattactttttttgctttaatttcatatagaatttcttcttctacaccaactgcaaaagcgccaagtatctgattatcttttacaatataatcaataacattaacttgattcataacagtaacatcgtttagttcctgcactgcatctgctaaaataggtttaatattttcaccattaatttttatatttctatttcctctagccatatattcgccattttcatcttttaagataacaagccctaaatcctctaacttttttgttaccttatttaaaccttgtgacattgtaagaagtagatcttcacgcacaatattatctgcatcttttttagcgtaatccgcatagtcttcaggagttcttcctttaactatatatgcattgattgcatttactccggctgctaagcacccacttctcttaatattagctttttcaagtataagtacggatgcatcagaattttcacgtatggttaaggccgcatagcacccagcagtgcctcctccaataattaatatatcagtttctaattgttttacttgaacgttcttactcatagcatatctcctttttttaggcacatgagataaaataatagactaaagatgcgccgtatattttgtgtcaggcaaggaagtagatttcgctcatagcaagtctattagcaaaatttactgacgcagcatggcgcaaaataaacaagcatactggtctaatattttttcgattgtgcctagagtcaatatttactaaataaacacagagattattattccctgcatttttaagcactgatttttatttatacaaagctcaaatatatttaatctttgtctttattcatggatgatatttaaataaatacagacatttcttctgttttaatcttattttccacaacatttgcacttttttcatcaaatgcataaactctatggattaaaacgaaaacttcttcaccaatttttaattcttcatcttccaaactacgatatccataaaatatttggttccctacctgtacatctatttcaagattatttcctctaaatgcaataccttttacaatccccttttctgctgcaagaggagtcaaaatctccttatcatttttagcaatttgtataaactcaggacgtactattgcctttgtttctttagggttcacaacttcaaatccttttagcttagtataatcatctattagattggattcaccaataaattgcgctacgaaatgagtctttggattcttatatatctcaactggactacctttctgctcaattttccctctatttgttattattatttcatctgccacttctacagcttcatcttgatcatgggttacaaaaatgcttgttattcccaatttcgatattgtttctctaagccatcttctaagttcttttcttaccttcgcatcaattgctgcaaaaggctcatctagtagtaacaactgtggattaggagcaagtgctctagcaaaagctacacgttgtctttgtccaccagacaattggcctggataccttttttcaagacctttaagaccaataagctctataagttccataactctctcatgtatataatcttttttagctttttgtaccacaagaccaaacgctacattatcataaactgtcatatgacgaaatagagcataactttgaaatacaaatccaattcctctttttcctggttctatatcattgactttgactccattaataatgatatctccttcatctggagtttctaggcctgctatcattctaagtatagtagtcttcccacttccacttggacctaaaagaccaattaattttccctgctctattctaaaactaacattgtcagatgccttataatctccgaatcttttattaatattctttagttccacatacatacatactagacccccttcttagttttccattccacgatattacgtaatattaaaaccacaattgcaataattaccaatatagaagcaactgcaaaggctgctgaaaattgatattcgttatataagatctcaatgtgtaatggtaaagtatttgtctttcctctaatatgaccagatactactgatactgccccaaattctcccattgcccttgctgcacaaagtattactccatatataagtccccatttaatattaggaagagttattcttctaaatatattaaatccattagctcccatcatcgctgctgcttcttcttcatcagttccctgagcattcattaaaggtattatctctctcgctacaaacggaaaggttacaaatatcgttgctaatattatccctggtacagcaaacactatttttatattatttggaactaaaatattttctaaaaagctcccttttccaaatgttaatacgaatattaatcctgcaataacaggtgatattgcaaatggtaaatcaattaaggttcctagcaagttcttccctctaaatttaaattttgttatagtccatgcaacacatataccaaatatagtattcatgattgttgctattaacgtagctattaatgtgaggttcatagctttaagagtatatccatctgaaattgctttaatatatgcactaaatcctttagccaaagcttcagaaattatcgatatcagtggaataataagcattaatgtgagaaaaaatatgcttatacctatcaaaccgtattttaagaatttattttcacttctattcattgatgtttttttcacttactattcacctcatatctgctttaatttactattgtatagttgaattccatttataacgaataatattaagaatgaagcacctaacataactaaagctatagccgtagcaccactataatcgtattgctccaatcttgacataattaaaagaggtgcaatttctgttttcattggaagatttcctgcgataaaaactacacttccatactcaccaacacctcttgcaaatgctaaaccaaatccagttaataatggtgctgatatttctggaaatattactttgcaaaaagttcttaatctactagctccaagcattgctgccgcttcttcatattgtccgtctaaatcttcaagaactggctgaattgttcttacaacaaatggaattcctataaatgttaaggctataacaattcctaaaatagaaaatgatgattttattccaaatgaataaagtatttttcctatccaaccattctcagaatataaggtagtaagtgagatacctgcaacagctgttggtagtgcaaatggtaaatcaattattccgtctataaatcttttaaatggaaaatcgtatctaactaaaacccacgccaagataaccccgaatacgctatttattatcgctgctataaatgcagccccaaaactcaccaagtatccgtgtaatgttctagcatttaatactgtactaagaaatttatctaatcccattccccctgactttatgactaaagctgataaaggaattaaaactataaggcttaggtaaacaagagaaaaacccattgtcagtctaaatccaggaataactctttttgtcttgctcatattcatcccccactctaaaaaaataattaccatattaaaaaacttctctgatacctagccacttttatcttcctcttatctaagttagatataaaactggcaatctcccagatttgattatccttgatggtatagatccaactaaaatttctttttatatccctacttgagctaattatcactttataatctaatattctcagtttttaggaatatagatttggtcaaatgttcccccatctgaaaaatgagtctcttgagcttttttccatcctccaaataaggaatcatctatttttacaagatccaatttaggaaatgtatccttatattcctcagcaacgtctttatccctcggtctgtaatagttttgagctactagttcttgtccttctttagtgtataagtagtccaagtatccttcagcgacctctttagtacctcttttatcagcgacttcatccactactgcaactgatggctctgttaaaatacttaaagatggagtaactatttcataattatcttttccaagctgttgtagtgataacatagcttcattctcccaagctataagaacatcacctaatcctcttctaacaaaactagtagttgctcctcttgatcctgaatctaatacaactacattcgaatataacttggacataaactcttttatagaattttcatcaccattatatttttttgatgcataagcccaggccgctaagtaattccatctagctccacctgaagtttttgggtttggtgttacaattgaaacaccattctttgttaagtcatcccaatcttttatattctttggatttccttttctaacaagaaaaacaatagttgaagtatatggtgcactattttctttaaaactactttgccaatcactattcaagagaccagctttgcttatggcatcaatatcatatcccaatgctaaggttacaatatcagcatctaatccccccataactgcctgcgcttgtgaaccagatcctccatgagattgatctattgttacatcttgtccagttttttctttccagtactttatgaaactttcattaaacttagtgtataattctcttgtaggatcatatgatacattcaagagctccactggtttcttactattatcgccattagttccttgctttccacagccgacaaaagccccagtaattagcgtaatagaaagcagcaaacataacatcccagtttttttcacaatattctccccaatcttttttcataaatatttattgctcatatgtaaaaaaatcaatattcatatatgtttagtaggattttaaataaatgacatcctagaaaataacaagttttagtatacgttgcagtaataaatttacacttaaagttttattaatctaagatccacttcatactttcgtatagaaacctaattaaatcatacattattaaaactttatctcaattattatataaaataatgctttatgtgatgattgcactgtttagctaatcatatataaagttttttatttcctactaattttataaactttatatgaaatatactataagggaattttatgtttttgtcaataaaattaactcaaaaatattaatttttaacaaaaatcaaacttactaaatgaaaatgttaaattttatccagtaagtttttgaaattgttattttgtaaaatattatttatatttcgaaatcaccaaaatttgtatctatgattataaaattaatattaaattatttaactattgaatcattattttttaggaatataaatttggtcgaatgttcctccatctgagaaatgagtttcctgagctttcgcccatcctccaaattcaccgtctactgtaactaaattaacttctggaaatgtgctcttatacttttcagcaacttctttatctctaggtctgtaataattttctgctgctatttcttgtccttctttagtatataaataatctaaatatccctctgcaacttccctagttccttttttatcaacaactttatcaactacagcaacaggaggttctgctaaaatacttaatgatggcactactatttcatactgatcttttccaagttgattaagtgataaaagtgcttcattttcccatgctataagtacatctcctaatcctctctcaacaaaacttgttgttgctcccctagctcctgaatccaatactgttacatttgaatataactttgacataaaatcttttatagccttttcatcaccattatactttttcgatgcataggcccaagctgctaagtagttccatctagctcctcctgatgtttttggatttggtgttactatcgaaactccatccctcgttaaatcatcccagtcttttatattcttaggatttccttttctaacaagaaaaactatagtagatgtatatggcgaactattttctttaaatttactttgccaatcactatttacaagaccagcttgacttatagcatctatatcatagcctagtgctaaggttacaatatcagcctctaatccaccaattactgattgtgcctgtgcaccagagcctccatgagattgatttattgttacatcttgtccagttttatccttccaatattttataaaactatcattaaattttgtatataattctcttgttggatcatatgatacattcaaaagctctacaggttttttactgtccgaattttcactattagcttcttgctttccacaacctataaaagcccccattattaaagctatagaaagcgtaacacttaatattcttctcttcttcataacatttgcccctttcaaatccattatttatcatatatgtttagtaggcttttagttataattgcctatctaaatctcaattaaagaatttataacaacatcaataatccgtattattttattggttatactgatatttgttttaattcctattatttcaatgggaattatatgatttatactatagtttatattattcactttgtcaatacatttattcaaaaaaattctattaacatagaacacagtacccacagttttctctccacaaatataaacttcaagaaaagaacaaaatcataggagactttagaatctggagaataaaaaaagtagttgccttaaacaactacttaacatatatgccgcaatatttacatttaatatattaataagccaatttctcatttaatactaaaatataggtttataattgcaacatatttaattattagcattttatttttgctttatttttattccgtggcacgcattagctgatgaacaaccggagcatccacatccgcagccactttctccatttttagctttttttatttgcttccctatcacaaatgccataaatccaaatattataccagctaatataattgttgccaccataattatcactcctcaaatcttaatctaagtaaaccgttatacttaaatctagttgtataaacattattttgtataacttaaattagcattaactactttttcttttgatccctttcttcctgttgctataactataaatactacagctactgcaattataattgaaactacagctccaactaaacttccaacccccaatatataattaccaacttggttaataacaagtgccactatatatgcagttgctgtctggaatcctatagtaataaatgtccatttccaatttcccatttcacgtcttattgtaccaattgccgcgaaacaaggagcacaaagtaaattgaatgccataaatgcaaacccgcttgctgctgtaaacattgcaccaacattattaattaatgtcggatcagtttcagatgcatctgatattccatataaaacaccaaatgttccaacaagattttcctttgcaacaagtcctgtaactgttgaaactgatgattgccaatttccaaagccaagtggtgcaaatataggtgcaataatatttcctaggcttgctaatatactattatctgcatctaccatttcgaatgaccaattaaatgattgtaagaaccatactgctgcacaagaaactaaaattattgttccagcttttgctataaatgcttttactctatcccacatatgaatgactacactttttgcgcttggtatatgatattgtggtaattccataacaaatggtgaaggatctccagaaaataattttgttttctttaatataattccacaaacaacaatcattattattcccaagaaatatgctgatggagctacccaagctgaatcattaaagaatgctgatgcaattaaagctataattggcaacttagcgctacaaggaataaatgtagttaacataattgtcatttttctatctctctcattttccattgtacgtgttgccataataccaggtacaccacaaccagagctaataagcattggtataaatgacttccctgaaagaccaaacttacggaaaattctatccataataaatgctacacgggccatatatccacagtcctcaagtacagataagaataagaataaaagtataatctgtggtacaaatccaattaccgaacctactccactaattattccattaatgactaatccttgtaaccagtcagctacatttgcacttgccatccaatctgaagcacttccttgaattatctctccaaataacgtatcattaatccaatcagttcctattgtccctattgttattgcaatataatatactgcatacataataaccacaaaaattggcaatgccaagaaacgatttgtaacaattttatcaattttgtctgatgttgtttcttttccattgctgctcttcttaatcgcacttgaaactacatctcctataaatgcatatctatctgcagtaacaatactttcactatcgtcatcaagttcattttcatatttctgtattactgcttctatatcacttaatatgttttctggaagtttcaaattatctattatgtttttatcacgttcgaataattttatagaaagccaattaatattagtatctttaccttgtatattaccttggacaattttttctatctcatcgaaagcatccctagcttcttttgaaaaaggcacttgaaaattcggttttttctttgaattagctacttcgatagccttttccgccgctgctttaactccatttcctttaagtgcagaagtttcaactactggacaccctagagtttttgataatttattaatatctattttatctccatttttctctacaatatccatcatgttaagtgctataactgtaggaattcctaattccaaaatctgagttgttaaatataaatttctttctatattagatgcatccacaatattaattactgcgtctggtctatcatttatcataaaattacgtgttacaacttcttcaagtgtatatggtgatagagaataaactcctggtaaatcgacaatttcaacttccttatgtccttttaacttaccaccctttttttcaacagttacccctggccagttaccaacatattgtgatgaacctgtaagttcattaaacatagttgtctttccacaattagggttacctgcaagccctattttaattgacatttctattcctcctcatcactatatatacctttctttatcaatctgaactatggtatatatttttttgtattgaattactctacaagtatcatttctgcatcagctttacgaagtgataattcatatccacgaactgttacttctattggatctccaagtggtgccactttacgaacatacacttcacaccctcttgttattcccatatccataatacgtctacggactggtcctaaaccatcaacctttttaaccttaacagtttgtccacatttaatctcctttaatgtgttcattataaaaatcctcctaaactataattctacttgccattcttttatctaatgcaactctgctatccttaacatttattattagatttcctccaagttcagaaataattttaaccgtttcacctgtaacaaaccctaaactgtttaaaaatctttttgtttcatcatttccagtaatctttttaatattcatttcatttcccttattagctaatattaatggcataatgcttcccccttaattagattcactaatttttgcataaattatttatgtataattccttatattttatcgccaattaaagtcacaatcaattgataatgattttaattaacttctctataaataataatagcacttttcactctcattgaaaatgattttcaatgacttttttaaaaattatgctttcatcaattggtaacgttttattattgcatttttgctttttttattaaatttacttaattattttaataaatttataattgttaatattttatttgattctatgaacttcaataattcaaataactttttcataaaaaataagaattcttactatagaatcatatattttattagctaaatatatagaatctactcttattcaaaaactttattaactagaattcttaaacatatgccgtgtatttcgatatatattacaaaaataattcttcatcataattctaaaaatattataagaattttggcagtacttgttgtgaattatgcattgtgaattgcaatatatatacatactgttattactaaatttcctctaaattttttatatgtattttatttaacacacagataaaaaatagactatccaagatagaggaatactctattttgcacagcctattttcatttatactttatatatattagttaagtttctaaattttcaacataacttagcacttgttgtgctagactttaaatataaatctattattaaaacacagatataacattgtgtgcactcattcttaaatattaaatcacacaaaataagattaaagtatttcctctaatgtctttcttatagctttaataaagtcaaatgtatttaatgtttgaatgttatcatgctcagcaagtaacgataagtctttagtcattattccatcttcaattgttttaattgaggccttttccaatttgtctgcaaaattaactaaatcagcattattgtctagttctcctcttttctttaatgctccagaccatgcgaatattgttgcaatagaatttgttgatgtttcttcaccttgtaagtgtttataataatgcctttgaacagttccatgtgccgcttcatattcatagtttccttctggtgagacaagtacagatgtcatcattgcaagtgaaccaaatgcggtagcaaccatatcactcattacgtctccatcgtagttcttacaagcccagataattccaccttctgatttaacaactctagcaacaacatcatcaattaacgtatagaaatattcaattcctgcctcatcaaacttaattttatattcatcatcaaaaatatcttgaaaaatatccttaaatgtatgatcatatttctttgaaattgtgtctttagttgcaaaccatagatcttgtttagtatctagtgcaaaattaaaacaagctcttgcaaaactttcaatagacttattaaggttatgcataccaagaactactccatcacctgcaaagttatgtactaactctcttttttcttcgccagtctcagaggtaaatacaagttcacatttacctttaccttctattttcatttcaacatccctatatacatccccataagcatgtcttgctatcgtaataggctttttccacgttctaacatatggcttaactggttctactataattggtgccctaaatactgttccatctaatattgctcttatagttccattaggacttttccacatttcttttaaattatactctttaactcttgctgcatttggtgtaatagttgcacatttcacaccaactttatactttttgatagcttctgcagcatctacagtaacttgatcgtcagtttcatttctatactctaatccaagatcataatattctgtatttaattcaataaaaggatttaataattcctcttttattgcgccccaaataattcttgtcatttcatctccgtccatttcaactaacggagttgacatttttattttttccatatttattgcctcctatattgcttatatttgctttaaaaatctttagaaactaactttcttttttcttttagatatcttaatttctataaataattatacaatattaacgccctattttcaaacaattagcattattatatatgttttaataataaattcacatttaaatttctaataagctaagcacttaattaaggcaaaatatcgaaactcaattttaatatatataataattcttcatgatacttctaaaaatattgcaggaattttaaccgtaattgtgaattgtgaattttgcattatgaatttccatatattacaattactcaaaagaccactcagctattatagtttctccttctcctaaagtaatatcaccgtcactaagccaacaaatagcatcatccctatgtctattatctgtagaatcatcctcatcatacacttctataatactctcatttttctttttatttacttttctcttcttacctacatcttttttaacttcaaaaattacaggagaattattatgttgatcaatctcatccttctttacttccgtcacattactattgttatcagattcattttcactatttagttttggattatctacttttaaaagtgctatctcatcattcttattttctttaatatctacttttccttgtatattagtcgcatctttagaacttacttctgtattcttatttttatccatatcagtcttttctaaaattcctatttcattttctttttttacaatttcagatttttccttgactttgatattttgatgctttacaaaatttttcaccttgtatatattattatctacaatttcgatcatttctaaattcactagaacgtctaacgcagcttttacttcacttatctctctattaaattctattgataaggtctctactgtgtatggaatatttcttgacatatataattctccctcttgatttacctttccagctaaaacaaccatcctgttccaaacatagtgaataagatctctattagacattctatctattattttaaattttgtgtcgtcatacatatcaactctaaatctcacgtatcttctctctttcatactcatcatttcccttcatatttatataccaacaagttaattcacaaaaatgttattatatgcagcatagctgctctttttcaatgtgcatactttctttctctcatgctcatcaatctcctctcatactcacataccactaattaattcaaaaaaaacgttcttatatgcagaaaagttccacattgcagcatagctgctctttctataggtgcatagctgctcttttcaatgtgcgtatcttctctctttcatattcatcatcccctcatatttacatcttatcgagttaatccaaaaaggttcttacactcaaaaaaagttactgattgcagaaatgttccgtatcgcagcatagctgctcttttcagtagtgcatagctctctttttatcggtgcatatttatccttccaattaatatatacgcaaaaaaagaaatatataaagggttctaacaaatttttttatcaaaattataattttctaactaagttatgcgtaattatttagacagcaaaaaagctcagttaccaaaactgagctttaatataaaaatattatttttcttttttgtctacatcttcatattcaacatcaataatttctccagttgtatagtcatctacaggagtgctgtagacttccttatctctatcattattataatagttatttaaattcttctttctctttttttctttaaaaaatcccactatcttcataacaatatatattattactcctgctatcagaagccatggaagaatatgtagaattaatgatcctactaaaaatattatacaaattgttcctataatatacatatatcttttaaattctctgttcattacactcaacctctatattacttagtttctcatttagttaaaagcataccttaagtataccttatgaatataaaatttacaatgtacataacaaaatcgtagtcgactttggttaagttccgtattgtgcttcgcactcttttcatatgtgtaggttttttatgcattttatgctctataaggtatgaatctatatgttattaaaatcgttactacaagcaatgctgtaacaactattcctccttctggtccaaagcttcctccattaactatatttgaattaatagttcttatggtatatatagaatctgtaatatttccacttaccaagaatccaaaaatgtcaccctgaaaataattccaagttatatgataccctatacacatccatatatttttagtctttatgaataaatatcccataaaaattccgaataaaaacaaattcacgtatgcaagtaaactgattccatgatttaatgaatgcattagtgaaaaaattatggatgatcctaaaataggaatccatgctattttagtttgttttaaaacagtcatgcaataccctctagcaaaaagttcttcattaatgccaacaaatataaaaacaataagctgtaaaaataatgttcttgaaaagtttggactattaaaaccattcactagttcaactgatttagtacataacaatataattgcaaccatagtaaatgatattgcgccaaataataagccataaaataaatctttccatccttttcttatattaattaatccaatatctttcactttttttctatctagaactttccagaataaaactacaaagaatatcattagtatgcattgtatcaaatttaaaaatgcgcctggaaaagaagacatacttaagagctgctcagtaatataacttataccctcatcttgttttgacagcaatgctggattagtcataaaaacaaatgcactatatatattactgaagacaaccgacattatagttgtagatacaaagaaacatacgaaaacaagtattatcttccaaccagatcttacttgcttacgatcattactaaaaattctcattaacatcctccaatcaatttctctttacaattttattctcttttaaaacatatatctctaaatcaaccctttttcataatttatcccctcaatttgcataatgtctgaagatttatcttcaatataaattcctagagaagaacaaaatcgcaggcgactgtggagccggagattttttcacgcatctgcctcttcgaacgcatgtgagaaaaatttggcaggcgaataagatttcttttttattctttttaaaatacaaaaactagtcaatcaaccttttttaagttatccacagattttattgtaatataaattcctaaagaataaaaaatattcacctctatattatatatatctagttaatataaattcatgaaaatattcttaattattaattaaaatatatatttcatgcgaatctatactgagtgtggcgttactttcccaatatatatttcgattcacaattcacagttcacaatgcacatttcacaattacgactaagactcttgaaatatttttataattatcatgaaggattatttttgcaatatatataccatctataaacatgttggttataaaatattcttcatagaatccaagtacttgcttattgttatctagtatttctaaattgagattctaattttatctaaaaaaaaaaaatagaagtgatacctctaaatacttagaatatcacttccatttcaatatgctattttcttaagaattcattaacagatattcctgctcttattccttcatttatagctgtaacaactaatgattgtccacgtctagcatcacctgttgaaaatactttgtgtacattagttttaaaatctttttcattcgcttttatgttacttcttgcatctgattcaacaccaaaagcttctttaatgtaattttgtgaacctgtgaagcccattgcaagcaatacaagttcagcttgataagttttttctgatccttcaactggcactggaccaaatcttccattttcgtctttcttccattcaacttttacagtatcaacactttcaagatttccatctttatctgtattaagacctgtaactgtagttaaatattctcttggatctttgccataaaggtctataaattcttcttggccataatcaaccttaagaactttaggccactctggccatggattattagctcctctttctttaagaggttcacccattatttcaaattgaactaatgatttacatccatgtctaagtgaagttccaacacagtctgttcctgtatctccaccaccaattacaattacatttttatcttttgctgaaatataattattatcatcatgatttgagtctagaagactttttgtattagcttttaagaaatctactgcaaaatgtacgcctttaactccatctctaccttttgctacaagatccctaggctcagatgcaccagttgcaagtactactgcatcatattcatctaatatttcatttgcatcatagttttcaccaatattggcgttagttacaaatctaataccttcctcagccataagatttattcttcttagtataacttctttatcaagcttcatatttggaatgccatacattaataatccacctggtctgtcacttctttcaaaaacagtaactttatgaccacatttatttaatgtatctgctgctgcaagtcctgctggacctgatcctattacagcaactttctttccagttctcttagctggaggattagctttaactattccatttttaaatgcagtatcaattatagctctttcattttcctttatagcaactgaaggcccatttaatcctgctgtacatccagcttcacatggagctggacatactcttcctgtaaattctgggaatggattagtcttatctaatctttcataagctaaatcccattttcctctatacactaagtcattccattcaggaattaggttatgaagtggacaaccagataccatacctgagaataatactcctgattggcagaatggaacaccacagtccatacaccttgcaccttgaatactttgcttttctgctggaagacttaaatgaaattctttatagtcttttattctttctttaggttctctatttttacctacttctctatcatactctaaaaatcccgttggtttacccatttttctaaccctcctaatttcctttaatttcttggaaagttttaattaatgcttcatcctcatcacatccaagattcttatgcttttcaacagtttccaatactctcttataatcctttggaattattttgtggaatttagatttttctgtctcaaagttgtataatattttatttcctttaggagagcctgtaactttcacatgttcttcaattaagttctttaattcttcttcatcttctaagcttaactcttctaatagaatcatttcttcatttaagtttattctaaagtttggatcctcttcataaatgtaagcaattccgccactcataccagcagcaaagttaattcctgttttacctaaaacaacaaccttaccacctgtcatgtactctaatccgtgagctccaactccttcaacaacagcagtcgctcctgaatttctaacgcagaatctttcacctgcaataccatttataaatacttttcctgaagttgcaccatataaagcaacatttccaatcaagatattatcttctgctacaaatgttgatttctttggaggatatactataattttaccacctgataatcccttacctaagtaatcattagcatctccttcaacttcaaaggttaatccacttggaatgaatgaaccaaaactttgacctgcagctccattacacttaatagtaatagaatcttctgttaatccatctgaaccatttactcttgttatttcagatccaagaatagttccaagtgttctatcagtattagttatatcaatttcaaagtttactttttctttcttttctatagcgtctttaaattggcttaagaatactttttgatctagcactctttctaatttaaagtcgtatttcttagtttcatcaaacttaacaacttttcctttatacttatctggagtgtaaagtattgagcttaaatcaacattcttagctttccagccatgaatattttctctctgcttaagtttgtctactctaccaaccatttcatcaatatttctaaatccaagacttgccataatttctcttagttcttgagctataaagtacataaagttaactacatattctggttttcctttaaatctctttctaagctcttcattttgagttgcaactccaactggacaagtatctagattacaaactctcatcataacacaacctaaagttactaatggtgcagttgcaaagccaaattcttctgctccaagaagggcagctatagcaacatcacgtccactcataagtttaccgtctacttcaactctaactctttctcttaaatcgttaagaagtaatgtttggtgagcttcagctagtccaagttcccaaggaagtccggcatttttgattgagtttttaggtgatgcacctgttcctccatcataccctgaaattaatattacttctgctccacctttagcaacaccagctgcaacagttccaactccacattctgaaactaacttaacagatactctagctccagtgtttgaattctttaaatcatatattaattgagctaaatcttctattgagtaaatatcatgatgaggtggtggtgatataagaccaacccctgtagttgaatgtctagttttagcaatccatgggtaaaccttagttccaggtaattgaccaccttcaccaggttttgctccttgtgctagttttatttgaagttcatctgcatttactaaatactctgaagttactccaaatctaccagatgcaatttgctttattgaagatcttcttgaatccccatttgcatctttagtccatctatccttatcttctccaccttcaccagtgttagacttaccgccaattctgttcatggcaatagcaagtgcttcatgagcttctttagaaattgatccataagacattgctcctgtcttaaatctcttaacaatttctgaaactggctcaacttcttcaagtggaattgccttagaattatagttaaattctaataatcctcttaaagtgatttcagctttttcatcatcaattaaagaagtatattctttaaataattcataatttgatgttttagtagcttcttgaagtttatgaatagttaatggattatataaatgctcttctccactatcttctcctgatctaagcttttcatatcctggagaatctaacgaaaagtctgctgcataagttttttctttaaatccatttttgtggtttatctctgcttctttttgaatttcagcgagtccaattccatcgattctgcttatagtattagtaaagtatttatcaataacttcttttccaattcctatagcttcaaaaatttgtgctccttgataagattgtattgttgaaatacccatttttgaaagtattttaattatacctttaagcactgctttattatagttgtaaacagctttatcatattctaaatcaagtaatccttcttcaattaatcctcttaagctttcataagccatatatggatttatagcagaagcaccaaatccaagcaatgtagcaaaatggtgaatctctctaggctctccactttcaagtattagagcaactgaagttcttgttccttttttaaccaaatattgatgaagtgctgatactgcaagtaatgacggaataggaacttttgcctcacttatatttctatcagataatataaatatagtatatcccttttcataagcatcttgagctttttcaaacgtttcatttaatgcttcctctaaagagccacctttatcaaatacaatatcaattacttttgattttaagtttcctttattataagcctttattttagctaattcttcatcattaattattggtgaatcgagtttaatcaactcacaatttgatgctttatcttctaatatattaccctctggtccaagataaacattagaagctgtaactatttcttctctaatagcatcaataggaggattagttacttgtgcaaataactgcttgaaataattaaataacggttgagaattctttgataatactgctaaaggaacgtctacacccatagccgctaatggttcagctccagtttcagccattggaagcattgttgtttttacttcctcataagtatatccaaaagctttttctaatttctttctagtttccttatcatattcaatcttgaacttcttactttcattcattttatctaaagtaatcagattttcttttaaccattctccataaggatattgattagcataagaattttttaattcttcgtcatctataacttctttcttaactgtatctacaagtaacattctacctggcattaatctatctttcttttcaacaatttcagctggtatatccaatgcaccaacttctgaagaaagaataagtcttctatctttagttatataatatcttgatggtcttaaaccatttctatctaaaactgcaccaactttttcgccatctgtaaatacgatagctgctggaccatcccatggttccattagtgtagcattatattcataaaaagctttcatttctttactcatagttttactcttataccatggttctggaattgccatcataatagctctagttaaatccattccgttcatatataagaattctaaattgttatcaaatatcgcagagtctgatccttctttatttatgataggtaacactctgtttaaatcttttccaagtgctctagatttaacatttgtttctctagaataaaccttattaacatttccacgaagtgtattaatttcaccattgtgaatcataaatctattaggatgagctctttcccaacttgggaatgtattagtactatatcttgaatgtactaatgccaaagatgtttcaactctttcatcttctaaatctttataaaattctctaagctgtgtagatagtaacatccctttatatactattgtctttgatgaaaaagacgctatgtagaaagtttcatttaggaatttacttatccatcctgctcttttttctatatttcttctaacaatatataaatttctttcgaaatcttttcctggttttattccatttggtcttcttacaaaagcttgcattattgcaggcattgcttctagcgatgcttttccaagtattgaagggtttgtttgaacttctctccacccaattagttcaagtccttcttcctttgatatatcttcaaaaaggctcatagcttcttttcttgccttttcttcttgtggtaaaaataccatagcaacagcgtaatccccttcgtttccgagagtcataccttttgatttcaattcttcctgaaagaatttgtgtggtatattaaataatattcctgctccatctcctgtatgttcatcagcgcctgtaccacctctatgctctagcttttctaggatagttaaacaatctgataatatttcatgagatttctcaccatcaatgtttactatagtcccaattccacaagcatcatgttcaaaacatggattatataacccctgtgcattcggattatttctttccattaaaattcccccttgagataataatatattcatttgtaccttcctaaatatttatctatcaggcacctatttatccttaaaacaatcatattgcatttatgtgtagcaaacaacgagtaaatacatccttttttgaaatataattactcgcgtatttgctaaattttacaagttattcattttcacttaatattaaactcgcaatatctttcattcttttcccagaatccatacttatcttctgcatatatctaaacgcttcattctccgtaagtcctgaagttttcatgagttgacccttagccttttcgataagctttctatcttctagagtatgttctaacttttcaacttgatcccttagcttcttgattctctttttgctttgaaaaattaaatttatagcattagttaagagaacattagagattttggtaccaatacaatatatatcagtatcttcttctataaatgatttataaggctcatttacgatagctaaaaaactagttacatctactagtgtttcataaacatctagtaaactcatatccttgaatttatatcctactaagactaggtctggggaatgttgcataactaatctaattaattcatttcctgaagcacataatgctatgatttcatagccttcctgcattagtaaactctttaatttttttgctgtctcaatattgcttaaagctataataattcttccatcttgagccattgcaatccccaccttaattaataataattggtattactaaattaatatctattaagatagttttctaattcccagtcatgtactttagttctataatcatcccactcagctgctttaccttcaagataattattgtatacatgatctcctaaagctgacttagctaactcactttctctcatgaattgaactgcttcatataagttattaggtaagttatcaattccgttagcttttctttcctcatcagtcatagcaaaaatatttgcttcaacttctgctggtggttgtagattgtttttaataccatctagtcctgcttgtaatagagctgctaatactaaatatgggttagaacttggatctggacatctaagctcaactctagttcctgcgcctctagctgctggtactcttattaatgctgttctgtttttacaagaccaagctaaataaactggtgcttcatatcctggtactaatctcttgtatgaattaactaacgggttagtaacagccgcaagacctttgatattctttagtaatcctgctataaagttataagctattggacttaagccattcttatcattttcatcaacaaagacattctttccatccttgaataatgacatattaacatgcattcctgaaccattaattccgaaaattggctttggcataaatgatgcatgtaatccgtgtctttgtgcaatagacttaacaactagcttgaatgtcataatactatcagctgtagttaatgcatcaccatatttaaagtcaatttcattttgtccttcagcaacttcatggtgagatgcttcaatctcaaatcccatttcttctaatgctaaagtcatgtcacgtcttgcattttctcccaaatctgtaggtgctaaatcaaagtacccacctttatcttgagtgtttgttgttgcattaccattttcatcagtttcaaacaagaaaaattcacattcaggtccaacattcattgtatatccaagttcagctgcatctgctatagctctctttaagatatatcttggatcaccttcaaatggctttccatctggtttataaacgtcacagattaatcttgcaaccttaccttgttgcggtctccatgggaaaattacaaaactatctaagttcggtcttaaattcatgtcagattcttcaattctaacaaaaccatcaatagatgatccatcaaacatacattcattatttaatgctttttctaactgtctgtctgtaattgctacgttttttaatgttccaaagatatctgtaaattgaagtcttataaatttaactccattttcctttactaagttaatgatatcttcctttgtgtactttgccattttacaaaccccctttttttctaaaaaaagacgcacaatagaagcggtataccatctattgaacgcctttgctcaattcatttaataagtaaattatataccaccgtttctaacaaatcaatagattttttaaaaaagtaagtatttttgtggtaaaaactttaatttttaaagaaattaataccatattctttaaaaattaaagcttatatttatcaaattgataaatataaaaaataacttctgcagaaaattattttataacttatagcaaaaaaacgaaatcaatctgaattattaattctatgactccgttgtcaaagtatatataaatttgtaatacatatagatatccaactttaaaactaaatttatgtggtaacttcccgaaatcataaatattttgattccgaaaaactatgaaaatatcgctgaaggttctaagcagcaggttgttccactttagcatgctccaactttcctagggaagctcgactcattacatttgctgaggaagttcgagaacccaaaataaaattttggactctcacttcacaagctaaaatggaacaaccattagcagaaactcgactcacgttcgttcgctgagtaagcgattctcactaaatcaaagatttaggttctctgcttaagaatctttaacagctcattttcaaatgttttctccatattatgacccttgtggttacaaatatatttatgatttctagtgaagacattaactcaaggttttagcaaccttgtaaatatgttcatctaataaatcgaattcttaatttgtttatctatataactcctgataattaaaatattttgatataaattaccagtaacatattgttaacatactttttatttctatattgtttttattgatttattcaacgttgaatttcaattaaaaacaagaaacaatcaagtttcacttggtatttttattatacaaatcaatatttactctgtcaaacgttattaataatactcactattttctctacatataatatatgttgcaattaaatttctaaattttagtcttaactaataactcagcttactggaactttaaatgtgaattatctatcggaacattccacaaaagtatattactcatttctggttggaaaatacttcatagtccaagtatagtttataattgtggtatctataattaagtatgataaatttttttcatagaatatatatatgcttcaattaacaattcacaattcacatttcacagttacggctaaaattattacaatccttttagaattatggctaggaattatttttgtagtatatataatttattatattaaatgaattttcttcattaatgatttaaaggcattctatgtgtttttacacagataaagaaataaataacttgatttatgattgcaaaactcattacctgctatactatagttctatcttatatccattccttaatctgctttgcagtttattatatgttcttttctataaaaatactcaaatgctcaagagaaaataatcatttagcattattaataattaacttgaacatttttagataaattgctacaatcttatatgtaaaaatacatatatatgggggctataattatgaacacaattgtaacaaaatttggtggaagttcactagcagatgcaactcaatttaaaaaagttaaagaaataatcttttcaaatccagaaagaagatatgtagtgccatctgcacctggaaaaagaaattctaaagattcaaagattactgatttattatatctttgccacgcccatgtttctactggaatatcttttgatgatgtttttaatcatataacagatagatattgtaatatagttaaagatttaaatttagactttgatattacagagcatttaaacatcataaaaaaagatcttgaagaaggggcttcaagtgattatgctgcaagtagaggtgaatacttaaacggattaatacttgctaactatcttggctttcaatttgttgatgctaaagacgttatggtttttaatagcgacggttctttagattctaaagcaacagattcagcccttcattataaattatctaaagtttctaaggctgtaattcctggcttttatggagcagataaagacggaaatataattacattctcaagaggtggttctgatgtaacaggagctttagttgcttcaagcatcaatgctgatctttatgagaattggacagatgtttcaggatttttaatggcagatcctagaataatagataatccaaaaccaataagcaaaataacttattcagaacttagagaactttcctatatgggtgcttctgtattacatgaagatgcaatattcccagtaagagaagttggaattccaataaatataaaaaatacaaacaaacctcaagacgaaggtacttttatcgtaaaaaatacagatggttcaatgaagccaacaactgtaacaggtatagctggtaaaaaagatttcacagttatttcaatatctaaagcatcaatgaattcagagcttggtttctgtagaaaaatcttatcaatacttgaacagcacaatatttcatttgaaaatatgccttctggaatagatacagtatgctttgtaattcaagacactcaattgaagaacaaaaaggatgttgttgtggaagaaattaaaagagcatgcaacccagacagtatagaaatccatccaaatttagctatgattgctactgttggacgtggaatggctaaacaaaggggcactgctgctaagatatttacagctctttcaaatgctgaaatcaacattagaatgatagaccaaggttctagtgaaatgaacatactagttggtatagaaaatgatgattttgaaaaaggaattgctgcaatatataacgcatttaattagaaaatagatataaccgaaagaaggatacacttttgttccggttgctagagaatatgactttggatttctaacattagaaattgtacccattcctgcatgatccttagttcctaaggacaagcaacaatggaacaagttctaatgaagaaactccaaaagccacattctcaatgcaacactccacaaaagtatatccttctttctgataatgtatgattttaatatgtaattattaatttataactataaataatgttcttttctataaaatattaatttaaaagcctaattaaagagtctttccactccctaattaggctttttttatactgtttgattagtctttttcatcttgcttcttaagaattcaacgataactggtacgatagatataaatatgattgctataattacaaattcaaagttctttttaactactggaatgtttccaaagaaaaatcctagtgctgaaactactaatacccatagaattccgcccattgcattaaacgaaataaagtgcctatattgcatctttcctattccagctacaaatggtgctagcgtacggactattgggataaatcttgcaaagattattgtttttccaccatgcttttcataaaacttgttagttttatctagatgttctttcttaataagtttcccaccagcaatattaataagtttatcaccaaaaattcttcctatttcataattaactgtatctcccaggattgctgcaaccattaaaagccctaataatgcatatatattaagcattcccatagcagcaaaagcagcagcagcgaatatcaacgaatctcccggtaagaatggagtcactactaatcctgtttccaaaaatattatgaaaaatagtagcaaatatgtttcaaatccataattgtttattatgaatcctagatatttatcaagatgtagaaatatatcaattaaataagtaactgtattcatatttttcctcccatatgtttcgacatattaattaatttataacatatggttattatacattattatttagtaaagggaaattaagattttattaaaaataaattcttgaatttatcaaaacttatacttaatattttcacgttatatatttatgatttaatatcagaacaaatctggaagaggactctcccctatccttactgtagccggcttactgatagactgtacagttatggtatttgtataatctccttgaatttctggagtcttttcggtatataatactagaatctttccattagagtttgaaagatttgatacattataactgtaatttccattctgacctgacataattccaatctgatttattgaacctgtattggtaacttcatatacttttatatctccctctatattaattccatcagcaatcttaagagtaatagcattaccattcgcaacgccgctagcatatgctcctaaggttacagtcgctccttttgcaagtgtttctgttgttccgtctatatcgggttcattcttacttaaatctatccccttatataaaccatgttgcaggttgttaactccgcctatatatatagatggtgtatctatattcttcttagtaatcgttccaccaaagtttgtatatgaaatattattattatcctgaggcccaaaacctaatgttccatattttccatccacagacttgactttaaaagtaacctcaaacggttgagggcttgtttgctcccacatagagctctgactattataagtataagtaattttaggtaaagttatagttctcagcttgccagttccacctaattctccatcttctactgcatcaaaattacttcctaaatcaaaattcagcttagcatcgttaatacttaaagttttagcacttataccagcttttaatctatcagcaacattttgcatatctatatttccaaaattaaaattcccaccatcatttttactcttaagataatctatatcaagccccaacaatcctttatgcacgtcacttaaatttgaagttgtattttgattttgattacaactcatatcaatactaattattttataccctctgttttttatttcatcaagatcggattggttataagtaacatttcccgaattcactaagattattgctttattagcatttgcatctcctttattcaccaacaaatcatccgctttttctaacgctggtcttatatttctattatttgatgattgtggtgtcattatattattttgaaacaattgccttaaagtttctctttcacttgaattatttctattgaaaagcctatcatatgtcccattgtcaactgggtactttactgaatcattatatcctacaactccaaatttaatattttgccctttcaatgtattatccgttccattatttgaatcattaagcaatatgttagtaaaccaattctgcataagtgcccatctatttccttgactcatattgctagataaatctacaacaaatacagcgttagttatcattccacccgatccaccattgaggttataagcaaatgcatctgtattaattttatattttatctctatttcctgtagtgcatttgccggattaggtgttatactttccaaaattgcatgtatatctggaagttgattatcttctattgatattttttgcaccggtacgttagctgatattatagaactttgccaaggaaaagtaactgttgaatttgcaaatacagatatattgtcgccatatgcattagatttaatttttattgtaaatggaaccggatccgctgaatatgttactgtggttccatcattacttcctggtacttccttataattaaaatcaggtaatcttatagtattcccattgattgactctatagaagtatttgtattaggatcataattgaaatttacatttgttataggataactatctgctatatcatcccctatattactaaacacagcgtctatagccccactatcagtttcataaaaatttgaattatttgtactcatcgaactatgaatttgttgcattttagtatttccatcactatccaaaccatagccgattgagaatacattatatccctttcctttaattatttctcccattatcttagcatagtttaatgacttaccatcagtgtccgaatatccagttccactttgacttacattgctagcaacattcgattgcgtaatatctgtataataattactatacgaactcccttgatatttgtaaccagtataatttcctgtatatggacctgtcctataaccagatggcatatggttgctatcaaagccatagtttacacgattaaaagaccaatcgtaatacgtatagtatgttccattataatccccccatatccagccactattagctgtttgccaattataataagtcggttctccatctgacatgaatattatatttttacttgccaaagggttttgctctgaactattagataataaataagctgcctgccttaacccttccccagtattagtccctcctcctgcggttaaattattaatagatctttttaacgcagtaacatttgtagaactagaaacatcagttaatttatttataattgtcgcctgagtatcaaagtccactattgcaatttttaaattttttacagttgacatttttgtaatgaaatcagttgcagctttttttagattagtaagcttataattatcagccatactaccggaagaatctagtaccaaaacaatttcttttggcggtattgatattttaaaaggttgcggatgtattgtaccatttatagttatttcctcacctaactttggatttttaggtgtatatgaatctattgttactgtaaattgaggcttagaggcaatatctgcctttaccctaaatactgagctatttatagatactaatattagcattaaactaacaatcaaacttacttttttcaaaaattttctcttattacctttcaacttcaaacttcttcctcccctctgacagtataacctttttaaaaaccaacaatcttacgattatttattagctttctaatcctctatttctaaattcagtcacaaaattaattggataatctacagtactggtaccttgattcttactgagcactatactaaattcaattgaattagctttactaatatctccaccataatttatagtaaaactcttaatatttttcactatttcttcctgatcattttcaatattcgaaccatcgctatctttagattcaattatagataaagtcttcccatcctttttataattagaagaattctttatagttattgtccagtatctttctccaacagatccatcatcttcttcgacataagatttaatcatcaaatttttgacttccccattgacaatatcagcggattctacctcattggcctgcatagcaatattacttattttctcctgaacagtttgagctcctatttgcaaggtagacttaacatctgaatcagaaaagatcttattgcctgtagtaaatatagaacccataattcctaatataattacagtcaaagccaatacaattatcatttctataagagtaaatcccgttcttctcttattcatgctaaatccgcctttctatttaacaagcttccaaagcttagtattcaagaacttattaatatcataattaggatttaatatttcattaccgctatcagactcttctcctccaccagtgtaaatcgttccaccaaatatatcattgaacaattcaatattctgggattctatcctttcaatgatttctggatcataagttattagacttgtactattcccattagtttttcctttgattatcaaatttcctttcgctatgatagatcctctaaaattaacatttccatcgatagtcacatcaccatctgtccctattaatgcatctatttctttattatttgatgcattaataaatatataatcacctgtatcatcataattctcagaagcattatctccactaataactatattctttttagtcaatatagctttttctgcatcattatcattaatttcctttgcttcattctctgcactgtacttataactgttactttcatcaatatcttctggtaatttcattatattttctatagtatattgaggattagaagtactctttaaatcatacaggtttttcaaatatgttttttcactttctgttaacttgtcataatccttttgaggatatcccatattataaactttctgtgcatattcctctcttttaggatctataatatcttccatatcattatcattaataagatttgtagcatcgttcttgacttgaaattttcctgataaatctttatatattatagcccctacagctttagtattacttggtaatgaaattccacctgtattctcttcctttaactttccatcccaataatcttcaaaatgtactcttttctgagcaacctcatttcctgaattactattgctactatttgttccatcaaataaataaagcggatcatgatagctaaatatttcattaggagtgtttggatctggaactgaataagctgagtaatttcctttaaaagcaagagattcaccagttttgtatggttgatcttttgtatctatatatgccacacccataatataagcactatttttaatatcaactttagaattactatttccgttaactattatacaactagaattcttatccttttcttcactttcctcaccattaacagttctctcattaattccataaaaattattaatttttatgtttgtagaatttgctttcaatgttatatcattgtctactactaaattcccgatacttaaattagaataacttgattgattcccatttatatttcctgcatatagatttctcgcatataagttactagtaatttgtgctggtttatcattatcttgtccaacattatttccaatattaaaagtttcattagtcataacattatcaaaagtaaaattcttaacattttctaatgttattccacctttatatttattataaactatcccataatcaccagaaatttttgttctatctcccttaacaaatacatctcctgtaacctgcagattgctcaaattatctatatccatattccccccaaccgtaattcctctattttcgagggcaggatactcctgtaagtttcctgtacttttcgtgaagtatacatcattataattaggaacaaacattgtatatgtagcctgaacagttctcatattcctgccaataacattcgtattctgccctttactctcaaattctgattgtaccgttattgtatatttttctttattatatacatctagacttaattgtttgccactagattgtaaacttatgctctttacatctaaatcattgcctgtatcatatctaattccacctgaatcatttatagaaagattcggtgggttattgttatctgggaattgaatttctgctatatcataacttgattcattatcattcaagtctctaaccccattcacatatgacttattgactattgattcctttaacttattaggtgtaatttccttatcagcataatcttttccatcatactttaatatgaaattattaaaagctcttttaaattcttgatttacaataacatcaagcatttcattatcttcctctatttttttatcaataaattgctggctcttcttatcttcttctttatcatgattactgttatattccttccaatagtcgatatcaatcttcaaatcaatgaaatcttgattatacggacttgtttcatcatcattactatctttagttaagctttgtaatcttttaactcttaaatttccatactgagcagctgcatcaaaggtttttccgattagattatatgcaacatctaatcctgattccgaactatataaattttcaactctcttactttctacaactctagctttataatttgctgatatcattgataacatagccatcgatattgtggatacaaacataaatataattataactactatataacttgaaccatattttttccttttcacctcttcacccccaattcctttttaaatatattagtagtaaattattttcacggattttccacatctatattctcgttaaaatatccagtaaataaatccccaccatttgtatacgctacttgaactttaatatcatgtaaatctccaatttgagttccctcttctgatctattattgtaaacattcacttctccctgacgagtctcaatatctacattcaaatcacttgatttttctaaacatatatttataggctcatcatctttattatataaatttatctgtatgttctttgatttatctaatacataatctttaaaattgacagtaaattttatttgctttttcgccttttcaatactatctacattagagaaaactcttcctataagttgcttcccatcttcatctttaataattatttttttctgttttttactactatcccagcttgtataggcaaaaagttttatatctttatcagatttaatttccactgggcttgtgcctagatctccactttcatcatccactctgcctatctctatacttccattattattcttcacaaaaacactataatcaaatgtttctacattatcatctgacgaccctgcattccctattccccctgctgaattaacttctatgcttttaccgtcaattgaagcctgagttttatttaaagtaattgtttcaacatatttacttaaactttcactgcactcattataattctcatctaagtaccgtttgtaaacagctacactacctcctgcagattgttcaaagtttatactgcccacatttaatgcaccttctgaaatatgaaattctccattttttgttgcaacttttatctcttcaattacattctttccttttaatgctgcagtttgtttcacttgcgcatctttagtttgtttaataagtaacaaataagcattatatacaccaaccgaaattattgcaatcaaggccatacttattattacttctagcaacgtaaacccctcatacttttggaaattcctttttataagtcctcacctacttttgattaacgcttatactacttccatccccttcaacttttacccgtggatctgcagtatcatctcctgttacattaacatttaccagtttgtcagttttatttattatcttcaacttaatttcggatttatcatttgaagtaattctattttcacttttaacatctaaaattatattttgtgatgttggcacaaattctgctccaatcccatcgtaatttatcgggaacgttcctttagatgttttatatttgtaataataattatcaccatcttgagttagtataatctctacattttccatggaattactatctgcataaacataagttgtttttaaatcatcatttacctttcctaacattatcgttggtaaatcagaggttgatgattttactgttgctacaaaatcactagtatctttgttagcttctatgttaccactagcagctcctgtactaaatggtacacttttcccataagtattatttaaattccattttaaatatccctctagttcatcatcaatctttggaactgcataaatttcaagattcattgtaccctttactgaacttaaggtatcttgatctatttttattgaatttactactatctttttttcattacttccaattgtctttaataacgtatttaaaccatcataacttccattaaaatccacttctaccttaagatattgaactgtattttttttctgatctttgggcttacttgagcttgaattatttccactacttgaatttgaattattagtattagaattacccgaactctttatcttatcactattactagaattcttgctgtcaacactacttgtattcccattgcttttctcaggctctcctttgttttcaatactacttttttgtttatcgtcaacctcattattatattcatctacaattccttgtaatgaactttctgctaaagtactactctttttatcttctgtttccacactatcagaaattatagtattaaatttaatgcctccatctaatccactgtttttcaataaattatctaactctaatattatatgttcctcgcttatagttggataaaacggtagtgattcatcgcttattttagctttcaatatcttcacatcactctttttagattcaattgaatttatcgtatttatcgctgtagtatacttctgctgaatttcattttgttgctttactttttgctgtataatattaatttcataagaataaacgaattgatagtacgctaaacctaatactataatacccaagatatataacattactttttctctattacttattttcatattattcaacatcctttaacatgcattttatatcaaaagagtattctccttctaccgcacccgaattatctatagaatttacataaacatcttgcatcttaggtaacgagcttaaattatgtttcagctctgcaactgcgcttctgcttgttgatacaccttttatagtaatagtgttatctgatatatctaaattcttaaaagaaacttcacttggtacagttgaacttatatccattagcaatacatccgatacattatccctattcttgacggaaactgctacatcagtaagtgcactatcatatttctttaatgtagtaatctgtttgtttatatcgtctgcttctcttaactgctcttgtatttctggatcagataatttcttattataatcatctatacttctattcaaaaggattattctaacagtattaactccaaaggttcctactattaaaagagctactatagccattgctccatatatatatattctagaatttatcttttccttattttttccctggtaaggtttaaaaaaatttaaatctttcattaatacagcctcctaactaaagtcttatgactgagccgattacgttgatgaagtcatctattcgcttaccatcatcactagacttgaatgctattttagaaaggccttttcttctaattgtttttattccaagtttttcagtcatatagttatccattccttttagtttagaacttcctccaaaaattactatgctacttacttcttctcccatatttttatttttatagaattgaattattttttctattttttctgtccaatcatcagtaatttctctcacatgaatattgattggctcgaaaggttcctctaaatctatatttctaatcttaaaaccttctacttcttcagccttaattaaattttgttctattaataattcatcaatatcatttccaccagcttttatcattctggtgaagtctaaatttccatttttatatatattaacatcgataaagcttgctcccatgtcgatgaaagcgactgaatcttctggattatattcgtattcattatttttatctacacaattaataaatttatttattgcattataattcacatctaaagcataaggctttaaatctaattttattaaaagatcataatatcctctggctattttatctggatatgctataactcttacatttagtttttttgattcatttatttcttcttcacttaaaacttgtacttgtaatatataatcttctaaatttataggaaggtattgttgaatttcatatcttactacagtatccatttcttcttcttctactttgggaactaaaatttctctatttataattaaagttgaattagtagtacaaatgccatatttggccttaattccattttcctttaacacttgtcctaatttattaaatagttcttctgatctttttatttctccatctacaacagcacctttaggtgttttcatagtaatatatttatctatagttaattcttctttataatacattccttcaactatctttatcatagaacttcctatatcaaaagctactactttcctctttttttctggggcgctaattttatttgctttttttaacccttttgataatttagcttttaaagttcctagatctgtattcattaaggctttaatatcaattgattttttcttttcttttgtttgatcattatttttctctttcatatctacctcacccctactcaaaaacttatataaatatatttgtactatcattcttaacaaataataatgtaagattaataaatcatatttatagctaaaaatttatttccattttgcaaaatactattagctttatatagctcttcacaatgttatgtatctaaggctttcattttttaacacgtgcaaaacctttaataaacattttgcacgcataaaagtcaagttctattagtcttgtggatatacttttgttccactcccagcgtagtcaacttctatatttccatgattactaactgtaattgtaaatccagtattagtcccagggttgtttttaggagttagacttccatctatctgagttgctatagatactgttccagtccccgcaaaatctgttaatgaagttggatctgcatctgtttgagtatctgaaattgtattgcttgctatttctgccgctactaccgtagctatattcttagcggttgcaagatctgctctttcattcgcactagttcttatttcaccgaatttaggtatagctattgctgctaaaattgcaattattgcaataactataataagctcaactaatgtaaatcctttcttttttctttttgatatttcattactttttttgagtaataattggttcatttaaaacccctcctaatttttatgttatttattttaatgcactctgatttatacattgtgcattaattgacattttttaaatttgattataactatcaaacattggtatcattattgatgctaccataaatccaattataagtcccattactactattagtatcggctccataagagctacagaactttggataattgaatctagttcctcatcataaaaatctgctgtcttattcaatatatcatctaaagatccagtttcttcgcctatttttaccatggaatataacatttctggaaatatcccactttccctcatagacgtatataaactttcccctcttactaccttatctcttatttttagcaactcaatttcagcaattttatttcctgcaacgtccgctactattttcaaagcttccacaagtggcaatccacttgctattaatgtagataatgttcttgtaaatcttgacactataatcatttgattaagtttttttagtactggaagcttaagttttaggttgcttgaaaaatatataccttcatcgctttttaaaaatatattaatcaaaaagcctgctaaacctataactattattataatataccaataatttttaattccactgctaaggctaagcaaaaacttagttgaccatggtaaaactgttccactttgttcaaatatttctgtaaaagttggcattacataagttaatataaatgccaccgcaagaattgaaactatcccaagtacagttggatatattaaagcgcttttcactttatttgtgattttattttctttttcataatgagttgccattctaagcattatatcttctaaattaccgctagcttcacctgatgctactaaagatactaaaagttctggaaatatatctttatgctttgccatagaatcagataaaacttcaccttttgcaacgtcatcatttatagccttagtagcttgtcttaacttttggttctcgatttgagagcttaaaatttctaaacaagttaaaattggtacccctgcattcaacatagtataaaactgcctacaaaatactgataaatctttgagctttactttcttattaaaatttagggtaatattcgtactttctattacctcttctacttttagtggatagtatccattacctgaaataaagtctataacatcgtccctagaatctgcctcgtgagttccttctattttttctccatctgggttcatcgctctatatttaaatttcgccatataatcaccttctttcagctcacacatttcacaattatatatataattcctctttaatttctttgatatatttttaaaatttaaaaacacttatttaaaactattaattttctcttcctaaactaactattgttgatagttcttctatagtcgttcttcctcctataaccaaatctttgcattcgctttctagagttttcattccttttcttactgaaatatctcttaaatcatctgtattagcacctgagctaatagcttccctatgatctcttgttacttccataatttcgtaaattccaactcttcctgaatatccagtattattacaatatccacagcctgcacccctatatatggttaatggttcatttatattcttttctaagacttccttctcatattcactagcttcataagcttccttacaattgttgcatatttttcttactaatctttgcgcaataactcccacaacagatgttgaaaccaaatatggtttaattcccatgtctataagtcttattattgatgagggcgcatcatttgtatgaagagtacttaaaaccaaatgtcctgttatagctgctctagtagctatttcagctgtttcctcatctctaacttccccaatcataataatatctggatcttgtcttaatatacttctcagtccacttgcgaaagttaaccctgctttttcatttacgcttacttgattgattccattcattgtatattctactggatcttctactgtaattatgtttacactattagaatttaattcatttaatattgaatacaaagttgtagatttaccacttcctgtaggtcctgtaactaatataattccgtgaggatttcctattattctatttagtctatgaatattttcttcactcattccaagctgctttttacttaatatagatccatttgtatttaaaattcttattacaatcttttcaccattaaccactggaagtatggatactctaagatccacttgggctccgtcaacttcgaacattatccttccatcttgaggtattcttttttctgctatatttaatcccgcaagtatctttattcttgtaactaaagggcctaaactttctatcccaagtgtattaacggtctgaagctttccatctattctataccttattcttatttcattttcaaatggttctatatgaatatcagaagttttcatttctactgaatttctaaacaggtaatccaccattttaactactggcgcactattaacttcgctcatctcatctatggcttgtttaccatttttgactgctttagtactttcttttgccagttgaatagcagcattgttaacctgctgactactataatatattcctataaatttctttatatccgcttttctagatataaacgactctatctcaaatcctgttgatattgcaacatcatcaatagcaaagatattcagtgggtctgcgagtgccactttaatcttattgttatcaaatccaaatgggatcaacaagtatttatcacacaaattttgaggaattaatgtaattgcttttctatcaaaatttattgtgtttaagtctacttttttaattcctgtctgttgttctattgcttctattatatcttcttcagttataattttactatcgagtagtatttctcctagcttcttccctagtgtcctttgagactttaatgcttcttgcaattgatatcctgtaattttccccgcatttacaagaatgttacctagtcttcttttctcagttgccattctgtgtctcacctttcctatgatttataaataaaatgcggtataacaccttataatcagtataagtttgctatttaatttacacaagtaaagttattgtaaaaaagtgtatcttcacattaacaagctccaatagatttttaatatttctgttccatagatcattgaaattaaacttcctattgctataaaagggccaaatgctatcttttcttttgccttctttaattttagcgctaaaacaattattcctattattccacctagcacaattgctagaaataagcctaataaaattcctttaactcctaagaacactccacacacagcagcaatttcaatatcaccttcacccattccccttgttaaaaacactattaatcctataattattgctccaagtattcctcctagaattaaatctagaacattattcttatataaaacatattgtaacaatataaataaaacgccgactattcctccaaaaatcgtagtacttgtaaatacaaactgagtatcaaaatctatagcactaattactattaaaagagataccaaaatacaatattttatagtaattacatctaatccaaactttaagtatacaattagatacagcaatccatttaatatttctataagcggataccttatagaaattttttcatcacaatatctacatttccccctaagaaatatatagctaaatacaggtacaagatctagcggatttaagttatgtttacagtttgtacaatgagatggcggaaaagcaattgatttttccatgggaattctataaatacaaacatttaaaaaactacctataactagtcccaaaatacatataaatatataatccaaaaaatcacctctcattgtatattttaatattatttaacttttttgtaaacgttgttatgtacaaatttgtattttaactacatttttttaaatatttaataggaattatataaacataataaactttctttttattaaaatacagttaatctgattgtatttcaatatcttcctctgtcttacctaaaaatatttcatacttttatttaaaaaatataaaaaccggcctttataaaatataaaggtcggttgcactactaactcaccatatataaagtgcccaattaaaatatatggatcaaagtttccttatgacaaaatatacttgttatttcttttatttcttgcataacatattaaatgtagccaatatatgccatagtaattataccataatgatcattaattggtctatcttgtttcaaatttttctttttatattaataacaattattaggtgccactacacttttatgtaagtatttgaattaattgctataaatatctctatttataatatcatatttacaaattttttacaactattcaatattgttgttaataatattttacatatgttgcttttcaatctagaggaaatttaaaaagcaagaagttgctttaaatattgttatttttttctgaaaaggtaattatatcttatatttattaacttcggcatgctggccttaatctggtttttttatttctttcaatcactcaccaaactctagaacaaatcttaattttatttaagaaatcatttatacttaattaacatatatcacatatttttgcaataattatttattataatgacattgtaagatattttcttactaattatttatccttctattttaaaaaatataataacctttagggatagcttgttgtaccagccaagctatcccttttcttttacaattaacaaatccataagtaaacaaaaacacttccaatatcaattaactatgtaaataaataaatgaaaatttctaacagctgaaaaagatgtccttatgataatgcctgtattgagtcttttcattcaattttgaaaaaagctttagtaaagataataatttaataaaaatgtgtccaaattattgatccaagtccaatcccccaccggaaattatacctaaaggaacactatttctagagttcaattagttttttacatcatcaattctatttcttttacacgattatcattattatttgatacaagtttggatttagatagagatttaggtacacttgcttttttatattcaccatttacaactaatcttattttttgtaataactcttttgcttcttcatcagcttgaagttctttctgcaaattctcaaatgtaaaaatttcttttgttttagcaagcttctctaatatctcacgctgtcttttactaaactttttatatgtatttaatatattttttaggtttatttcttccatttacttcctcccccgcataacttattatacaaaaagcggcaaaataattcaacaatttcaaattaattcttaataactataaatagcacctatgtataagcatttatcattattgcttagatcaaaaaacacatacattatcattaaattgcgcctccttagagtccacctatcttttgcagtattaagtaaagagcaaactatctctaatatacaagctgattttaagttaataatattatctgttgtaactctcgctaaagcgattaaccataccaaaaacaaaccctatctatatattttaccaacgctactttaataatagctacacatccacgaaaatccaacgtttacctgattttattcgtgaaattatacttgccgaaacattatatattcctgtaatctaattatttcttttaccttctttcattagatttctttatatattatatttttacattaggccactaagtccccaacatttgctgtgaggcgcagcaccaagtctttttgcttgatttaatgtcatttcccttgttttatcaccaccacaatttggtgttctatgatacacacaaccgttaatacttaaataaaccattctgctattatctgcaatcacacctgtcttcttaacataatctggtatattcgtagtccatgcgccatctgcatctagataataacttccgatgtattgattcttagccatgtaaccatcagaatagaaataataccattttccaactatttgattccatccagtagcataagaatccccgttagcataccaccattcaacatcatcctgtttccattctgcactcgcccctatagatgtaaatcctagcagagttaaacttagtaatcctatacaaatcatttttctaataatctttttcttcattattattcatccccttaaataagtagttaatacaattataccgtattcaggaaactttttcaaaaaaagaatattctatacaaatcctatctcaatattgacaattatataaaatgttttttgatttcttttcagctgctatcaattcatcaaggtaaaattgctttgtatatgtaatcaaatatgcaattatggcttgctttttaatatttgaatattccaaaagaacttccgcaattatctttacaatattgtaaccatacttcatcacattataatcatcaattttgttataaaacacaataaaatagtagggaaaataattttgattttcctaaatccggccaacatcatccaatttgaaaattccttatcaactttcataaatatattaaccaattcactatttcaaaaccttaattttatttaaggaaatatttatatccaatcaagatatattgaataattttgtaatgattgtttgatatagtaacattgtaagataaattcttatcagttaaatatccttccacttaagaaatataatagccatttatagatagcttattgtattggccaagctatccttttcctttttcaattatctgattgctatttctaattatttcctgaattttagtctattttttagctttaaaataaattttacattgaacttacataataaacataattttgcaaaaatattcactatactattaatttaagataattttttattggtttattatctttcatacattacagctacagtaatcatttatagataacttattggaacagataggttatcctttttattttataattattcaattgtcatttcatatactgccttaaagaaaacaattcatatcaagttaattaatttgacataatattgtcacaattacctcttataattagaattgttaagcttattaaattattactgcgactataatttaatattgtccaaattcagtactattttcaaatgacttattacaccacgataagtcattttttattttcttaccaaaggctgatttactgaataatttttaagttaggcgtaactttagatctaattaactatgcactatttatctgagttaaacttaattctccagcaacttctaaaaaattgttgaagaaattacaacatactccctttagagcctcgacgtatataccaaccacgcaacgttgcaaacatcatttacacagaaacctctatatgtaatctctttatatttgtcaactgcctaaaaagtaaacattaataaattattatttctataacttttcatagttcttagactgtaattttatatttgcaattctaaaataaattcttctaataaatcttttaacaacaaaaaaaccaccttctatcagtttagacagaaaatggtttataaaatataacatacatcaatctatttttaaaaatttaatgtatatcgtaattaatattagcctttacaatttttcaaaaacttcttgatattagttattccaacagttccaaagactattcatcccatccttcagggaattcagcgttgtggtacacttcttgaacatcatcatcatcatcaagtaagtctaacatcttttggaacttcttagcatctgcttcatctatcgctgtgtatgtatctggaatcatcttaactgaagcttctaagaattcaatgccttgcgcttctaatgcttctctaacggttccgaactcttcaggtgcagttgttactacaaatacttcttcttctgatgcgaaatcttcagcaccagcatctaaagcaatcatcattaattcatcttcatctttatcttctttttcaatgacaatttcacctttttcttggaacataaatgatacacaacctgatgtacccatgtttccgccgccttttgtaaatgcacttcttacatttccagcagatctatttttattatcagtaagagtttcaactattacagctactccactaggtccataaccttcataaactatattttcataattaactgatgataattccccagatgcctttttaattgcttttgaaatagtatcattaggcatgtttgctgccttggcttttgcaactacatctcttaattttgcatttatatcctggttagctccaccatttttaacagccatcacaatttctttacctatcttagtaaaaatcttacctctttttgcatctgtcttgcccttttttgcttgaatgttatgccactttgagtgtcctgacatatgttttcctccttactttattcgtaataattatctctatttttataaatatatattgcaattaagtccctacatcttgatcttattttagcacttaacttactaaagttttaaatatagattcatgttaacaatatatataatatctatttgtaccgattcttattacaagttattcatttaattaattattttttctttaaaatacaaaatccaacagctattataccacattttacataagttcacaattatcctatcaccaaataattctctataatctttattaaaatataacattatattacagccaagtctctagctttttaacacaattttggccctagtccattagaattcaaatacaaacttatcattttatattttcaaatataatctatttccttctttaaaatatatgtcctcttcactttttctaactatcacttttccgttagtaacttctacaatctcgttttctatatcttcagccattaacttttcagctaatatattaacaactactttatcgctgtattcagtatcttctatatgccaagaattttgaccgcatgtatattgaacttttccaaaaagatcatattccatttcaaaacttaatttcaaaccttcaaccttttctacaactccagctgattttatcgcgatgctggcaccttttgtataggctctagttagaccacctgcccctaaaagtattccaccaaaatatctcgtaacaactactgcacaatctgtgaccctactttttttcattacttcaagaattggtattcctgctgttccttgtggttcgccatcatctgagtacctttgaatattcatgtcttttccgattatatatgctgagcaattatgccttgcctgtttgtgcatattctttatctcatttataaaagctttagcttcctcttcattttccactcttcttgcataaccaataaactctgacttcttttcttcaaatctatcttcaccaaagtcttttactgtaatgtacgacatatcaatctagctccttttcaatctcaaatcagaatatatagtacgcatattgatttaaaacaattttatacatacttaaataattagaatattacgataccttactatgctgcatttttactgcatattctgaagaatatatattgtacagaatatatattctaatattgtttaaaatatatattctaaaattcttaagaatattaacatgaagtgaaacttagcctcagagggagtttttaggtgccccttgatggtaactctcccactgaaggttagttgaacttatctagggtcgcgtgccacactgttatctcccactttaatagaatatgggaatattacagctactagatatccgataaaatctctcactaattaatttaacttgtcacctctatgttctttagccaaaattaattcttccttaagtatcttcatacctttctcaatcttttctttatcggtttgataaaaagctatcctaaaagaatcttgtccatcattttgtgatgtaaagaacatagcccctggagtaatatatacatttttctttttaagttttataaaaagttctttagtattaatcttaaattcatcttttaaagttatataaaaatttaatccaccttttggatcattgtaggttaacatatctttaaattcactatctagaattgtttttaaatgcgtatacctttttatatattcatcatttagatttttaatattctttttccacttattgctcgaaatatataattccaaagctctctgcattaaacttgaagtagttatatctgtattgtgctttgaattttgaagagtttcactgaatacttctggtgcaactaagtatcctaatcttattcctggaagaaatattttcgaaaaactttttatataaataactctatcatttttatcaagccatttaaacggcacatattctaatgaattttcatatataagttccgataaataatcatcttcaattatgtaaaaatcataaatttctgcaaggtctaaaattctcttcttcttttctatactataacttactcctgttggattttgaaaataactcattgtataaaaacactttatttcgtttttctgtaatatcttttcaaatttatttaagtttattccatcttcatcaattggcacttcaaacaaattaacttttctccatttaaatactgataatgctcctacgtatgttggcttttcaactattatattatcatttatatttaatattcctttagatgcaatatcaattccttgttgagcacctgatataattattatgtcttcattgtttaatttattattccaaaatactttatttatagtataaataagattagtatatccatttctgttgtctgaaagtaatgcatttgctccatctctttctaaaacttcatttataattccttttaaatcatcaatagggaataacacttcccctgtagtttcacctgtaaaatctattacattagttaaatctcccatggatatcttttttaatgtatttgaatattcttttctaaaatttgaagcaacttcttttctttttgcataactaccgcttcctaccttttgataggcataaccttctgatttaagcttattgtatgcactaactatagtgacattgtttacgcctaatttttttgacagctctcgtattgttggaagtttgtctccttcttttatatttcttttatcaattaaactttttatataattagctacttgaatatacttagggatatcattatctttaaactcaaaatctttataaatatccataaaactctcctttaattgattgtaagactatttttttgattgtgcctcataactcttgtatgaatacacattctctctgactaatttttcactagaaggcaaatccaaatttttagtatctttcattatcaattttctcttgtataattcctttagtatatcttctatttttatattaaattccttgaactcatcactattttttatttcaaatgagcttaaaaatgcatttttttcatataaataatctagtaaagacttagcgccctcatttatattttcatctagaaaattctcgatataatctacagcgttttgtatattttcctttgcgcatttatcattaaacaaattatcaactataatattaaatttattatttaaatttatagccatttttactgcgtctttacttacagtgtatccatttaaatttaaatatagcttagcaaaactatctagagctctaattaaaacttcataagatgtaaaaacactattgttttgcaaatactttttagttactctaatgtcttttatgacattgcctaaatacaccaagttccaagtttctctatatttatctaaactatatttggctttattaaaaatgctctcaatttcatcatctcttgaaaatattattttagaagatattaataagttccttataactcccttattcccattactttcgtatagttccaaaaagctttctttatttaggacctttatatgtaccggtacccctagtatttcagaatatatatctctaacattatcaaatatatccttatatacaatgaataaatctatgtcagattcctcccaaagatcaccgctaattatacttccaaatgcaaatatagctaacacttttttattaatcttcaatacatttattaatttttcagaggacttttgatattccaatatggattttgacacttaatttcaccttcttttaccaagacattgtttactttgtttatcagatggctatcacctaaagcatttattcattttaataaaaaaataacagttgcaggcttcttgagatcttgccttttaaggcctaagtacaattaaattctagataaagcttaatcacatctgaatcaaagttttactttataacaaacttactaacattataacgtaaagaaatatttatttaaaggtactactttacagtacaactcaaatctataatattcgaagaacaaaatcgcaggcgactgtggttaagttccgtattgtgcttcgcactcttttcatatgtgtagatttttttcacgcatctgccttttcgaacgcatgtgagaaaaatctgcacatcagaaatcttattctttttaaaatacaaaaactagtcaatcaaccttttttaaattatccacagattttattggaatataaattcctaaagaataaaaaaagattcttaaatataatatctaagaatcttctgttctattcacaaatggcggacaatctttatccattttctttatctgatgtatgtaaatcttcaaacgcctgcttaatgactctaatatctgattaagttcgtgattcatttcataaacaagctccaatgattcccttagttcttttctctcaccaaaagtattactttgtattacctgtgcaactcctgctatgtttaaagatgatatagagataaagtacaatgcatctagtaaaggacgtacctctctagtaaaataagttaaacttatctgctcgattctaattgaagcaacattagtttgagctgtacttatttgtgctattgctgtactcatatttgataactgttctaaaacttgattctgcatatctcttaattcattatttaaatctgatgatacattttcattaccagcggcatcagtcgcattagcacctgtacttccctgattcaataccctctgagcagttcttagggatcttgcgcttctaggatctaattgatttaatggtccacttgtttccataaactatagtctcctataacaattcttatttaagtatattacggaagaactatatttattattatatttaatcagttaaccttatatcttagcgtattcctgagttttattaaaaacttcatcatctacttctgctaccatatatgttccattatctttatattcttcttcaagtattctagcatttctatgtaagaaagattgaatatcgcctttctcataaggtattaaatactctacttttctataattatatggcaatttttcctcaattaaacttagcaatttatctaaatttattttttctttagccgaaatttctattacatcaaaatttcctactgcaaattctttaattcgcgctttttgttcttcagtagctttatctattttatttaaaactaatattgtttctttatctatagccccaagctcacttaaaacttcatttacagcattatattgatctattgcactatctgaagatacatctattacatggcatagaagatctgaaaatataacttcttctaaagttgacttaaatgcttcaaccaaatcatgtggtaattttcttacaaaaccaactgtgtctgtaagagttattactccttttttacttagagttacagctcttgttgtagtatctaatgttgcaaaaagcatatttgcttcaaatactttttccttagttttattttcattttttgctgccaaatcacaaagtgtatttcttaaagttgattttcctgcattagtatatccaactaaagatactttaggaatattttcttttcttctcttttctctttgtacttctctagttctttttattttcttaagctcatcttttaaatcatatattgtttccattatatgtcttctatctgtttcaagtttcttttctccaggccctctagttcctataccaccacctgttctagataatatagttccgagtccctgtaatctacctaatctatatttcaactgagctagctctacttgaatttttgattctttagttttagcccttgttgcaaatatttctaatattaatgttgttctatctattactttagctcctaatgcagcttctaaatttctaacttgagatcctgaaagctcatcatcaaatattattacattagctctttctacctgtctcatagaagcgatttccaatactttacctcttccaataaagtatgctggatcaattttacttctgctttggaatacagttttcaaaacaggtatgttgcaagcttctgtaagctctgctaattcctctaaactttcttttgtatcagaaccaactaatattgctttttcttctgtttcctctatgacatcattattcttaattaaattttctataaatcttatcctatctaaaatatttatagacataatttcatttaaagaaagattacttttttcttctgtttctaatttattgttatataaactaagcattcccaaagaaaaatctattatattcccatctgttatagccactgatataattgcatctagctttaattttaatagagctgttaaatctagtgctgaaagattacaataaccatttggatgagtatgtataactctaacacctgataatctcttttcatctatatctattattggaacctcaacagatgtagaatctccaattgcaacagatgtaacattaccttttctatttatagctacactgatttctctttcaataaaactagaaactctagaaataatatttaaaatttcttcattacatatttcatcttttaaatttcttatagaataaatattctctaactcttctattaaagattttctaattccttcaatatttccatatatcattaataaacacctcacattagccaagggatatttaagaaaataacaaaacagtatatttatctatctcgtgtcatactgcatcgttaggtttaccttgataattctttatgagttaaaccttactacttttctgacgcaaaatatacatattagaaaagagcctgtatgttgcatataagaacttttcattacatctttaactcgctattttcctcatatccctatcttgacaactttcatataattttatactattaattcattaattataactttaataatctacacttgacaatatacattttataaatttagagtaaattatcacataacttgaaaaatatgcaacaatttataaatacctatgaatattttatctgcaatcatatatatattgcaaaaataattcttcatcataattctaaaaatattgcaagaattttagccgtaattgtgaaatgtgcattgtgaattgcaacataatatattatgtattctaaaacattaaattcatcaacaataaatttaaactatcagttattgtaaactcaatagaatgaattatattattttagaacttatatgctaataataagctgtgtatttttaaggaaatgtgtacatttgaaaaataaatataaaaggagttttttaaacatggaagataagaaacgtaacattcttttttctgaagaacaaattaatacaagaataaaggaattaggaaaaactattgctgaagattataaaggtaaaaaactttacattttatctttacttcgtggaagttttatctatgctgctgatttagctagagctatagatttagatgctaaaataggatttatgactacatcaagctacggacatagcgaaacatcttctgggtctgttaaagtagttaatgatatctctgataatattgaaggatgggacgttcttatagttgatgatatagttgatactggaattacaatggatttcgtttataattacataaaaggtttgaacccagcttctgtaaagacttgtgttcttcttgataaaccttctcgtagaaaagtacatatacaacctgattactgctgttttgaaattgaagatgtatttgtagttggatacggattaaactacggtgattattatagaaatgttccttatgtatttaattgggaataaaaacaaataggtaaggctattcaatttaattttaagaaaaaaggttataaggcgaattcttataaccttttttctatatttaatttgtgtctccactcttgttctgatcatttgtaggaaatccaagagttgtatttggtatttttccaactatgattgtgtctgaaaccggaacttgtgtgcttacttcagcgtcttgattccttagtggaagcctaagcctgattttagctgtaacgtttaagtatatcttatgcctagtttgattaattccagcactttcaaatttagattcataacttgtacttatatttcctataggctctatctcaacacttatcttagggccaacattataaaaggcacttttatcactcatccagcctaaaggaacttttattgcagtgtttttcatatcacttaattctttattacattctgtagacaattcagctgctatataattcaattttccagtatccgcttgaattaaaattatattgccttggttgtctttttcaatttttaccatctcatcatacttaaaatcttttgataaaatatctacactttttttatttattatatctaatgtttgggactttgccattattgtcgctatttctgtcacagagggcatgaccctttgatcaaaaaacattacagttatgtttaaaatgacaataataactataataagtactataaatgatatgtatttatgcgtttttcgtcttgtataatattgcattgtcaacacctttattattgagttatttatttaatcatactataattatgctataatgatatagaatattattaaattatataccttgtaattttaggaggataaaatggcaattaatgataacgtgaaaaaaccaaacaatgccccacgaaaaaaaaagccatctaaaaagaagaaaaagaaatcaaaaaaaatttttaagggcatatgttttggttttatattttgttttcttgcaatgttagtagtatgcgcaggttatgcttttgctattataaaaactacgcctcctctaaatgtcgatgctgtattaactttaaaccaaccttccagtatatatgatagtgctggggactttatggataatatgcagactgatgaggaacgttacgttatagattcaagcaaaataccatctaacttaaaaaatgcttttgtatccatcgaggatgaaagattctaccaacataatggaatagacattcagagaattgtaggtgcagcttttttagatgcaaagagatttgttactggacaaaaaggactacatggagcatctacactaactcaacaattacttaaaaacacaattttaactaatgatgtttctattgaaagaaagataaaagaagcttatttagctattaatttagaaaaagcattaacaaaggatcaaattttaacagcttatttgaacacaattcccctaggtggtcatgtgtatggagtggaggctgcatctttattatattttggtaaaagcacacctgatttatctttgattgaatgtgcatatctagccggaattactcaagctccaagttcatatagtgcttataacaatcaaaaggatccaagtccttatattaacagaacacttaccgttttaagtcagatgcataagcttcaatatattgatgacgctcaatatgataaggccgctaacgatgttaaaaatggtggtctagtatttaaatcaattaaaaaggattatagattaaattatgaatggtttgtatatcctgctgtgtctcaggtaaaagaagacttaaaggaaaaatataaatattcagatgaagaagtatctaaattaatggttaatggtggtcttaaaatctatacaaccatggataaagatcttcaagattttacccaatctactttagataattataaaaacttaggaattaataacaaggaaagctacgataaagatggtgttcctttattacaagcgtccgcaacaataatggattacagaaatggtcatgttcttgcaatggttgggggacgtggtaaacaaggtccgcaatcaataaatagagcttataatgatttgcgtcctatcggatcgtctacaaaaccattaacggtatatggtcctggcatagatcaaaaaattataactgctgcaacacctataaatgatgcaccaatacctcctgaaatcggaaagaagtattctccagcaaaagatggtccttataatcctctaaattcccctaatgaatattcaggacttatgacctcaagagatgctcttacgcattcaaagaatactggtgcagttttaacagaagataagatcggtatgaaaactggtattgaatacggtgaaaagcttggtctaaattataacgctgcttctaagtcatcaatggcagctgttgctttaggacaattcaataactctccaagtgatagggacggtggtaatacatctatcttagctgctgcatatggcagctttggtaacaacggtatatatacagagcctatgctatatacaaaagtagttgattctacaggtaaagttttacttgataatacttcgccaaaacaagcaaaagttttttcaccacaagctgcatatattctatatgatatgttaaaaggaccagtaaatgaatacaatgctactggtgcaaagtggggcaatatgcctgttgctggtaaaactggtactacttctaattccacagatttatggtttgcaggactttcaccttacttatcagcttctgtttggattggatatgataatcctaaagaactccatggtagttcaagtgggtgcgctgttgtttggggaaaattaatggctaaagctcatgcaaagttagaggtaaaagatatagaagagcctagcggaatagtaaaagctagtgtttgtaaggattctggtgaactttcaacccttttctgtaattttgaccttagaggaagcagggtttatgaagaattattcatcgatggaacacaaccaacttcaaattgcacaatacactctggtactaatcgatataattttaataacggatcttcggctaatttaaaccctgcagataataattcaaattcgggtaatgccccagcagattccgagactcctcctgcaactaataatgacgcactagctccacctgtcgttggtagtacggaaccttcacagaaaactgaaaataataatgagaataataattcaaattctaataatgctagcactggtggtaacaagaatactacacataattcttacggacctggtagtaacaatcagcatccaccaacaaataattaaatagctcaagtatattatgaatttgctaaattttaaatttctataaaataaaaatagaggataatcaaatatcagattaatcctctatctttttatttatttgtaataacttctttttcagcgccatcttttaatatatttaaaacattaccgctctcagcgctaataaaaaacttccaactaatatttgcctccttatcatttttaccatctatagttacaatgtaacagacttcatatattggatttttttctttttccattctattatctgcataaactaaatcagtttcatctttaactacagtttctttattgtatttttcaaaagagtcaacggatattttttttgcttctccactagaaatatttattacaggatctttacattccctttgcattgtagagttggaatacccatctagaaatccactttctttatcaatatttaattttatttcatcgaaataaaacggatatccattcttttgctttgtatatatgaatgagtaatatggcagctttttagcatcctcattgctattaattgtctttaagaccacttctccatcatatatgttctttaagtacccttctgctaaagttctagcatcttgtaaattaatttttgttgcatttgctggaatttctttttttgcaaaacctattacattattatctttatctaaatctataccaaaaccttgagttactatacttctatgaactaattcattctgactatttagcgtccttcttctttcatattttatagattctaaattttgttcagtatttattgcattaattgaatataacctagccataaaatccttagatgccctaatatcttttgcacctggaccaatcagattatacagtattatgactattattatgatgagacaaactaaaattattccccctataatactcgctttccttaacttcattaattacctcccttgcagacttaacattgctattctattttattataccatatttttatactagtcacattcaaaaaaataacaattccatctgttccaaatgtgctagttcaaagcttgttctttgaggctagcaccttggatgcaactttatagacttagaatcacccatcagaattacctagaaactggaacaaaagtatattattcatttcggtgatgcatacgcataagtatagattatattcgttttatctatatattctccacacacaaaaaggcctactttaaatactaattgttattctaagtaggcctttttaaatctaatattcaattattcattgatttaaagtccgtattttatatttctggaaaccataaagcaatttcttctttagcactttctacagtgtctgatgcatgaacacaattttctgtcttacttctagcatatctatgtcttattgttccttcttctgcatctgttggactagttgctccattaatctttcttattcttgctacagcatcttcaccttgcaatattaatgcacatagtgggctccttgttataaacgttataagttcctcataaaagtcttttcctttatgttgactataatgcttttcagcaatttctcttgtagctctcataagctttagggctactatttttaaaccattatcttcataacaacttaaaatatttcctattatatttctttctactccatctggtttaactaatactacgcttctttcaatcatacgaagacctccatatagtgtaattaattcatattattccctaatacatatacattatactaaagattctgaaaattttaaatacttttgtgattatcatctaatttttagatatattatgatataataaaaaaacaaagaatgaaatatatgttaagttatatgaatcactatagctaggaacaatcaaataaataacaagtatatttgccatcctattttacatcattggaagctcgactcgcatgcgctcactgagtattcacagagtaagcggccatcatcaaatcacatatttgaatgtctgcttaactaattcacaccaaatcatagatttggtttctctgctcatcagcaaattgacctaataggcctgatattagaaaaacatattttatcaaaagtatcgatttataaaggaattggaggataaacacatgattagatattcagcaatagtacaaggaagagtacaaggtgttggttttagatattttattcaacttacggcttgcaaactaagtttaactggttggtgtaagaatcttatgaatggaaatgtagaaatcgaagttcaaggactagaaaataatgtcttatctttcgtgtccgaaataaaaaaaggaaatggatttgctaaagtttccgatatagatttaaatatacttccagtattagatggtgaaaaaaagttttcaattaaatattgatgaagaaaatagaatgtatgagtgctaagaatttaacttatcatacattctattgtttaatttctattgcaattattctacttctaaatcttttattctgccttttttctttaatctcaataataattcctttggatcattatttattataagttcttccgggaattctattgattctagcatattaatagcttctgtaaattccccaatacgagtacaaaagtgcgcatcactatttattattagcttagtctcatgctccttacatagcgatgctatttttgtacaattacctaaacttccaattctagatgttgtaaatgagctattgttaatttctattaaaacatcattttccttagcacactttattacttcttcaaagtcaactggaactcctggatttccaagatgaccaattatatcaacttttccactctttattacgtttataaaagctcgtgtattttctgcaatatttccaactttgtaaacttcatcatgtatacttccaattacaatgtccaatttctctaatgttaaatcatccatgtctaagcttccatcataatcaattatgttagcctcagttccataaagcattgtaactccaaaaagttctcttggcagcaccttataattattgaaataccatatatgcggagaatgtggcatagtaattccgtgctctgtagtaccaagcacctttattcctttctccgaagcagcttttgcattttccattaaggttgagtaagcatggccgcttgctatagtatgagtatgcacatctaatgcatatttcattatatcaccccatttatctatttttggcaaaactatatatgctgcaaaaataattcttcatcgtaattctaaaaatattacaagaactttagctgcaattaattgtgcgttgtgaaatgtgaattgtacattacaacaaatatagtttataaagtatttaattattatttttctcaattactatgttatcatatttaaatttttattcaaatacgatcaggcctccgaaaacatttacttaaaaataattaaaagttggatgcatttataaacataaaataacaaatacaaaatactataattatttttcataataagtatattgttctcttatatgctctattagttcaatatacttagcggagatgtggttaagttatacaactataatttcccaacagaacagaatatgatattaattgaattgtgccaaacagaacgactgttaatgggaacaatgcaaattactatacagaaccttattgttatagaatcagtatgatgaaaaataaactcaatatactaacttattattttttattgtatcgtcttcttctacttcctattttacctttatcgctcttgtctttgcttttgtttttatataaatatagaactatagcaattactgcaaatattataaacaaacctattattataagcattatcttagcattgccgcctaattcctctaccttttcataaactggctttgtagtttcttttttcattttatatgttttaatattcccctcttcatctattattgcgcagtctccattaagtttttgaaacatctccgttacacttaaataatctagagagtcctctaatactttattatctggtgaggttaatacaagcattgccttttggctgttgtattttgatatatcaaattggaaatttgcaatcttatagctaaaaggttctgttaattgaagcttttcgtttgataaaaattttgaatagctttcatcatacttaaaccataatttatcatttatctctggaattaatttattagtttttggtgttccatagactattatatttttctttttatcatcagctgtcacatttgaattactgataactttaaaatctccattattgtaggtaacatcttttcctaaaaaaccaataacttttcctaatgaattcatttctttagaacttagactatctggaacaatcattgcagtatcattaaacatttcgtcttttacgaatggtgcactgtaacttgaaaaataatatccttccgtatcgttatcaccaatatataaatacgaatctcttgtaacaagggcccaaggcatatcctcttctcttttttcacaatatgtatcttttaaaattaaatcaaaaccaagctttatatctaaatagtttgtgtaacttatatcatttggtaaactaagctccaattcatcatttaaagccttacccttatcaagttttttacttcctataggtgtattattaacgtacactgtaactaaagatttatcaaaatcaagattatctgaatatctcataaaaattttaagcttatcgctttgagaaaaaaccttatttttaggaatactatagcttattccagcttctcttctaaaaacaccttttaactgtatttcaccaattcccatattgtcaaaagtgatttttccacttttagtatctggaactgtatctacctttaaatctttatttactttataagtatcaccacttaactgagatattaactcttggtttcccagtgctttaactcctcttattaagttgtcattatcattgcataaaatcatcatgtttttaatatttgtattttttgaatacaatgaatttgatatttttataagacattcatcactttgatcattttcttctgtatactcattaggaaaactattaaattttccaataaatatattattggtattttctcctttttgaaaatctccatacttagttatacttattttattttcatatttatcatttagtttttgtaaatatgaatttaagatgtatgcagcactaagctctgaatcagtgtaatcatctggaattataattaataaatcctctaaatcactatcattatcatgattttttaaaaatggatatggaaaatcagatattttattattggaaataatattgttaaagattgtttttatgttagtaccatcttttattacaaaccaattagctgaattaacatcatctacacatgggtcctcagatgatcttaagtaagcttctatttttaattcactagatccagtttttattagctcctttggtatagataccgttaactgctgaacctctgaatctgctctgtaataaactttttgagaataaaaaggcgttccattaacggataattttatataggaatttttactattatcaattaattgatttatagaaaaattcatttgaacttcagctttagtattttcccaccatttatctacattgaaatatatactatgacttgaaaaagttccattaaaggatatgtcattacttaaactataagtttttatactttcagttgtttctatatcatttccttcagatgcagcaaatacttcagcacctgtattaaatatcaaaatcgctgtagaaaaaataaaacacacgaaaaaaaataatactccaaagatgtgcttttcattgtgcctcattactttatttgaaatatatcctttcatgctgctcctccttaagaaaatctttctgtcttataccactttgcttcctttttcaatacaacatcccttatataattgtaaaaaccagccaccgaaactatagcccacattttgcaataagtaaaatagcttaaaaatataatcaatacattttttacatttaattctcctttttccgttgaaattgctaccattactgataagacaaatactaataatgccataaaccataaaataatctcataacctccgatatggagctcaattaaatttgctcctccaagcaaaaataaacagtctgatattacacttgcagataaaaaaaagaaataaaccaaagtataatatagaatatcaaattttgtcactcctgcttctaatccaaataaatatttcagattttttattaccacatatatatttccttttgcccatctgtttctctgcttaaaccatactttaatagtttgaggttcttgttcataagttactgcaagaggcataaattttattttatatcccattctataaattctaaagctgacttctgtgtcttctgttatagccttcgtatcccaacctcccatttcttccatcacttctcttctaactacaaaattagttcctggaatggtgcaaagtttaagcatataccatcttcctgcctgcgccatccattgatatgtaagagtttctatattaacaaagtttgtaagtaaatttacatccttatttctgcatctaaactttccaataactgctcctaatttcttatcttttatcaaagtctgcaccaaatacttaagagcatttttatcaggagtattatctgcatcataaaccgccaaaatttctcccttgcttttttgaagacctatgtttaaagcatttgattttccttttccccctattatattatcagtattaatcactataagatttctgccataataagttttttggacattttcaagtacatctttagaattgtcgcttgaattatcatttattactataatttcatatttatcatttggataatccaattctaacaaagaaattactgtcttttttattactacagcttcattatgagctggaactaatattgatacaaatggatatctttcaagctcttcatacatatattccttgtttacttttgaataatacatatatccggctattactaatatcacattcataaaaattgttatccatattactatgagtgaatatataactaaataatctaaaatattcataccattatttaaaaaacctttttctttctatatttctgcttattataagtattcctataaatattattaaagctgctccactgaatatttccagtcttctattagtaagcgttaaatcctctttaattggattttctttattaattgttttgttaacagcattttcatattcttctgcattaataaatctatcctgagttacctcttgattgttaaggaaaactcttccattatcattcttaatttcactttcaaactttatataagtgctcattttattacttggaataagattaatttctttacttaaaactttatcaacattatttttaaattcttctaaattgcagttactttctatttttattgcatttttaccgcttattttttcattattaatatagtcgtttaaatcaactttttgaataaaattggtataagctttgatttcataattatctatatcaatgttaatatcttcattgtaatttagaaataaagtattagtgctttctaaaatatttttcaaatcttctctatagataaattcttcatcagcatttattccaactggataaatccaataattagtataattcttaaaggcctctttaagtttatctccaattattttcccccctgtatctgtgccatttactcctttagaattaattataggaaacttaagtattacttttcctccattatcctgtgcatatcttaaggcttctgaaaatctgcccatggctttcaagttttcatttacaaataccggtgccgcttctataaaaaatttaatccccttatcttttaaataatctacttcgtcgattaaattgtttaaatcattaaatggagttacattatcaagatataaataagtctcagcttttaatttcaaatcctttttatctaaaagttccgaagctttttttatccagttaatctttccgttatatgattttaatttctcttttaatgcctctatactatgattttcttctcctatatttaaaatgaatatttcattatactgctgaaaatcttttggattatcgatatttattttagatatgctaatttccttttcctctgataactgacttttaactaaagcactcaataaatttttttcactaccatactccttacttttatcatacaaaataagtactttgttgttttctccataacatttcatgggggtaataaaatactcagcgcctataaagcaaatcaaaattgttatgactttataaataaagcatttattcatgtatatcatattccaattccttctctgccagtctaatgagctccaacggatcttttatagaattatcaaaggtataactaccaatttgaatatctagctttacttttttataatgagatcctttagtaaaatcatatttattaatattctctctaaatctctcctttacaactttagctccccccatatcagtaattgtcaaaaacccaaaagtcttatcatctattatatatttaatatcttcctctcttaaacttttttcaagaacttgacttgcctgaatcagcaaaagcttatacccttcttttcctaatatacttctaagtttttctgcaaacttaatctttacaataagtaaggtaacaggaattttatgtcttgtgctaagcttcatatatattggcagctctattaaaagagctctctgatttttaatatttgtttcttcatctatcatgactaattctgaattttcatttattaaactttcattttctgtttgaagagcaaaaatatttcttgaaactaatgacattaaaatagctgtacttggaattagaaaaatccagtaatatgaataaaaatcaatatttatatttccccagaaatttaaatataatttgtaactcatataaataaaatcgactgcaagagtaacaaccaacgccagagtaacattagtataataacttacaagagctattatcattacaacttcgagcataatataattttcaaaagaattatctaattcaaaaactttatagcttaaacataaaacaaagaaatacgctataagtatagttattaggatatcaaccttttttcttacattaactggttccacatatcattcctccagttcaaaacacttgaaagtgaatacaaaatcaaattttacttattgtttctttcatatatagataaccaagtatgaattagacttatacatatagccaaccgaaagtaaaaacattgttgcttcgcaggactataaaaatttcgctgaaagtgctaaattgcaggttgtcgccactcgtgcttgctcccactttcagtgtggcaagcacaagtggaacaacctacaataaagcacttttaacatctcatttttaaatgcctgctgcgcaaaaatatttctactttctagtataaaatatatttcaaagtataaatcaaacgctaattttcaaatgttttctccatattatgacccttgtggttacaaatatatttatgatttctagtaaagatatgagcttaataacttaaacatatatgttgtaaaaatgttacaggaatttcagctgcaattgtgcattgtaaattaaaacatatatatctatttattgttttttgattttatcttaacttgatgcttttgtaattttatagatataaaatatattaaaatcaaatcaaaactcatattatacatgaaaacatgtttagctaaatctgcatctcctgcccctataacagatattataatttgagatattccaactaaaaatatataaaaatatgcctcttctttgaaaatcatagtatcacagttgatttttctcgcctttatgtatctaacagctgaagaataacaataccctattatcacaataattgatagtacaatatttcctgtaaatactttttcttttactgtgctatataatgcaaaaaaatatgatttagccccaaattctttgttttcagatttctcgtaattccccattgcattaggtcttatggaatatccattatcaaaagctatttttaacattttaaaaaatgcccttggatttgtaatataataagagattatttttgttgtagtaaattttttataataatcctctataagctgtttatcatataaattaactaaagtcacatcatcatagaaagttgtatcttttaataaggaatactgctcatttaagttaaaaaatttcataacttcatcagggtcttcttcatataataaaatccctctattcattgcatgatatccattaatatattgaaaatccccagttatttgcttatagaacaatattgaacttatcacaaatccaatagctaaaaccatagatagccccttaaataatttttccttatttttaaatcctattctaagacataatactgcaattaaaataccaactggagaaagctgctgttttgaacctaaaaatataaaagatgagattccaaacaacaatatattcagcttgctaaacttattgaattctgccatatttaataaaattcctatgctgagcagaaagaaacttatattaatagcttccccataaaaggaattataataagctaaatatgttgtgtcacaaaatataaaaatggttactaacgttattattaatttatgtttttcttcagtaacttgatttattaatacctttacaattaaataaattccaattgcctctacaaataaaaacatccatgacatgaatcttatatctaaaatgaaatttttattaatcatctggcttatgtaaactgctatcttaataaaaatcccctgagttgatataaagtttttttctatatcattattgtatttataaattccataatgcctataaaaatatccattatataaatcactatcattgggatttaattcatatacaccatttgaacttatcactctatagaaatccccattatcagccatgccaataataggtttaataaataaagtaaatatgcctattattattactaggaaaaaagctgctaatggataattgatatttttaaaaatactatttattctattcaaaatatttttcatctttctccttcataaataataatttgattttcctttacttataggatgtgaaacaagttataaattattctttaaaatgtaatctatatgtacatatcttccatggtagaatcatcacctttattagttcttaaatatgtgttatcattttaaatgtatatattttaaaattcgaagcattggaaggagattttatgattaaattagttgtaacagatatggatggaactttactagatgagaatggtcacttaccagatggatttactgatatcttggaccgtttaagagcaaaaaacataaaacttgttgctgctagcggaagaccttattatacgctacaaactaactttggccctgtaggaagatatttatcttttatttgtgaaaatggagctttagttgttgataataatgagataatttataaaagtgttttagctaaagatatggttcaaaatgtaatcagtgaagctaaaaaagtcaaagcaaatgcattagtagtatgctctccaaattgtgcatatattgaaaattattctgaagaatatttgactgaaataaagaaatattatacaacattagaaattgtagatgatttaagtaaaattgatgatgatataattaaaattagtatttgtaatttggaaggtactaataatataactgacagtgaattaaccaatgatcttaatatagtttcaacagctgcaatttggactgatatttcaaacaaaggcgttaacaaaggtgttgctttaaagagtcttatgaatactgataatatatcaaaagaagaaactatggtattcggagattattacaatgatatagaaatgctcgctgaagctgagtatagctttgtcatggaaaacgctccagaggacatgaagcaatatggtaagtacatagctgcaagtaatatagaacatggagttttaagagcaattcttgaatatgctctttaatcacagtcataaggtattggtattgtgcagaacttaaagtgaatcgataaacacccgaaatagaatacatatatgttccgcaggactagaaaaatttcgctaggtatatctaaatgggacgtagtgcccatttatgcgtgctccaaatttatttggacaagcaaaatggaacaacgtcccattaagacataccaacagctcatttttcaatgcctgacttcacatatatgtattctatttctttgttttgctatcactttaagtatttcacatatacctttgattatttcgcgcctagataacgagtgtaaagttaaacactatcttatatattgtagtatatgccagaaaggaaggtcatgcttttgtggaagtgttgcattgaatatttaaccgcagacatttccttagtagaagttgtattatttttgcttgtcacgagcttgtctcgggaacatgcagaaataggacaacttatgctattggaaattcacggttaaatattctggcaaccggaacaaatgcatgaccttcctttcgttgtttatatacctaactatagtatctagcgcgaacttcattataacaaactcatttgctgtacttctgtttctttgaatgaagatatgctgactccaatcagccttacttcttctttcaattgctcactatctaatagctcttctgcaactttatatatttcaagctgagtgccaatataataatttaatgttttacttcttgtatgattttcaaaatccttggttttaaatttaagtgttacagtttttccactgacattttttctatttaaaatctcttcaatttcaaaagaaaattctttaatgtattctctcaattcttctttatttttagtatcgaattttaaagtcctttcttttcctatagatttcctttcacgaattaactcaacttttctaccatcaattcctcttattctatcgtatatctcaatgccattcttgcctagatactctatataaaattcttttggcatcttatataattcttcaatataatatatccccatattatttagctttgctactgatactttacctaaaccatgaaccttagatataggaagaggaaataatatatcaggaatcatttcttttcttatttctttaattccatttggtttattccattcagaagcaagctttgccaagaatttattataagatataccaatagataaagttaaaccaacttccttaaatactctatttttaatataccttgcagcctcaattccatcttttatttttccttgggacaaatctaagaaaccttcatcaatagatacaggttctactagtggcgttacttcattaaatatttcaaatatctcctgagatactttagcatactttccatatctcccagatacaaagattccatttggacatttctctctagccatgaacatcggcatagctgaatgaacgccgtattttcttgcttcataagaacaagttgatactactcccctttcacttatcccgcctactataacgggcttacctttaatatctggattgtctctttgctcaacagatgcaaaaaaagcatccatatctacgtgcaatattacattatccatttttataaaatcacctctttatgattaactaattttcaatatttaattgatcatgcatatagatatccaaatttgaaactagatttatgtggtaacttaccgaaatcataaatattttgttccgaaaagctatgaaaatatcgctgaaggttctaagcagcaggttatatccaatttagcatgctccaactttcagtttgacaagctaaattggaacaacctacagctaagaacctttaacagctcattttcaaatgttttcttcacaaatatatttatgatttctagtaacgatatgagcttaaaattctagcaattttgtaaatctgttcatctaataagtcgaattcttaaattggatacctatatagataacccgactgagacctgaacttatacatataactcgccgaaatgaataacatacttttgttccagttgggataatatttcatggtattaaatctagtttatctataaacaaattgcactcgttttctttatatagcttataaaaaaatctgtatattattatacaaaataatctataagtattttaacatataaatcattagttaatgaaacaataatatatggcataaatcttatatttatattaattgctatacatatatattgcaaaaataatacttcatcataattctagaaatattacaagaattttagctgtaattgtgaattgtgaaatgtgcattgtaaattgcaacatatacatattaaaaagttagctaattttatttgacatatggtataataataaagtattttaagtataatagcgttattagcgatatttttatgtaaaggagtaattattatgggtcttaaagaaaaaataggtagtaaattcagtaactatttccaaaatgcttatatggaaaagtatggtgacagaattacaagcatatctggaactgttttatctgtaaagcttattgaaaaaagttatgttatcttcaatagattaatggttgaaatggttataaagcctgaagttggaaaaaaagttgttaagtgttggtataaaaagaatagatggtttaagaaacctgaatttattgctgtaaagcagggtaacaaagttattgttatgggtgttacaggtgataaggatagtaagaaggaaaattctcaggaagttcaaatatttaacctattaaatcttacaactaagaaagatttagtaccaatagatcatagccaaataaaaaaatcacgtcaacaagcaaacaatatgatgagaagataaaaaaagggctaagccctttttttattttgtctttattaataaatatacactgttaataaatgctattatccctgaaaagaataggactataagccattgattaagagataatgctactgtatgaaatacattttgtaaaaatggtacatataaaactgagcacattagtgatattgatattaaaacagctccaactaaataaggatttgtaaataatttaatttggaatatggagtatctttctgatctacattcaaatacgtgtattaattgagataaaattaatgtacataatgctaaagttcggcatgtttccaaatccattttgtagtatcttcctaccatgaatgatagtaaggtacataatcctattaatgttcctcttattactattttttcaactaatcctcttgcaaatatactttcctttttttctcttggagattgtctcattatatcttgctctggtggatcaactccaagtgctatagctggaagtccatcagtagctagatttacaagtaatatttgtattgggcttaatggattaggtaaatagaataaagttgccaaaaacattgttaacacttctccaaggttacaagatagtaagtatcttataaattttcttatgttatcatatattattcttccttcttctacagctgcaactatagttgagaaattatcatccataagaatcatagatgatgcttccttcgttacatctgtacccgaaattcccattgcaactcctatatctgattccttaatagcaggtgcatcatttacaccatcgcctgtcattgcaacgatatttccttttttcttaaaagcccttacaattcttaacttatggttaggtgaaacccgcgcaaaaactcttactttttttattcttccctctaattctaaatcacttatagcctcaatttcatcacctgtcattacctgatctgctgtattacatatattcaaagattttgctattgcaagtgcagtattctgatgatctcctgttatcattataggttttattcctgcaagtttgcattttaaaactgcatctctagcttcttctcttggtggatcaatacttcctgctatacctataaaaattaaattctgctctaacttatcactttttgttagattatcttccttatatgctgctgctatacatctaagtgctctagatgacattgctgtaataaaatcactaacttgctttttcttttgatatgtgaatggttttattttgttattctctagtataaattcacatctatctattactctttcaggagctcccttaacgtaacatgtttcatttgctccctccttagcgccttccttgattataaccgacatcatctttctatttgaatcaaatggtatatcatatatcctatttgcatcatttataaaatcttctaaatcattaacatcattaaagaacatatttattagtgcagtttctgttggatcaccatgaagtgcttcactcatttttttctttgtaaaatcataattacagtcattacaatatacaagagctttcatgaactttgtataattacttagcttttctttttcaagttcatgaattctgccatttaaatatacctcttttacagtcatcttattttgagttaatgttcctgtcttatcagaacatattacagatgtacatccaagtgtctctacagctggaagttttcttacgagtgcatttttcttaagcattctagacacacctagagccagtgaaacagtaacaatagcagctaaaccttctggaattgcagcaactgctaagctaacgccaagtaagaacatctctgttatatcatttcctctaattattcccattgcagtaacaattgcacatatcacaaggcaaattacaactagtactttccctagagagtctaatcttttatttaaaggggatttttcttcttcaatattttgaattaggtctgcaatcttccccatttcggtgttcattcctatacaatcaactttaaataatccttttccttttactacagtagttcccataaatccttcgttattcttctttgtctttttaccatcagctttatatggattggcttctttgtttacaccaactgactcacctgttaatagtgattcatcaacgactactgatgaactttctataaagaatccgtcagcaggtatcctatctccagcctccaaaataacaatatcccctattgttaagtagatagaatttataatctgtatacttgaatccctcaaaactttacatgtaggtgccgctaattctttcaacgcttctaaagatttctctgttttaaattcttggacaaatcctagtattgcattaataactattattatgagtattgtaatggcatctgccttatctccaattatcccggaaattatagtagatgcaattaacacccaaacaatgaagtcattaaattgagatagaaatattttgaatgctgatgctttattatggtgcttcaattcattaagtccaaagttcttaatcctcttttccgcttccttagtgctaagaccagatgtcaactctttttcctgtaccacaacttttcctcctaaatatagaactttatataatatatatatatttcccattacgaagaatattactgtctacctaattaaattttatgtaaccattgctatataaatagctattttattagtcttcttaatatcccttttagaatatcttttacattaacatctgaacttatatatctgatcagatctccatagaacttaaagccttttcatatattaattaataactaattttctttttacgccaaaagacaggaaagtttaaattcctgtcttttaaataccacttttttatttaactggtactttaaaggttgccttctcttccctataagtaccacttacatattgttgcacttgaattgttatttcagaactattattagccaatccgtatccaacttgtgccttgctacacgatgcacctattggtgtttcttttggataatactttatgttaacaggataagtttctgcaacttcccctttctcatctataaccgtaaaatcactaaaatataagtccataaattggctagaatatcctagatttttataagaataattaataattacaacttgtgcaggatctttatccgaaaattgatttctatcttttgtagtttcaactgagttaatagtaaattcccattgtccatcaactatccatttttctcctgctttatatactctctctattcttgcaccatctgatcctagttgatacccatctattgttgtatcatgtgccatatatccattataattaaaatagtaccattttccgtctatttctttccaacctgtataccacgaattccaatcagaataccaccatccagtattgtcatgtttccattctgcacttgcacttactggcaatgctcctacaattaataatcctgttagcaaagtagctataaattttttcttcacaatttattccccctcatatatctttatattataattgtatatcacttgaaatatttgtcaaatatataaaacaagaaattcttcgatttattgcttgttgcaatcttgcctcgggaacatgcagaaaagggtacaactttctactgttagaaattcacaactaaatcctcagtaacccgaacaaatgcatgaccttcatttcggcatttacatatgtaactttattcttactttaggtatctagtgaacaatacctttattgttttaaaaaaagaaaaaatcccctaaaggattttttcttctttaaatttatttcatcgagttaactacatttgtaagtggtggtattacttgtttctttcttgatagaactcctggtaaaaatgccattgaatctactaattgaatattaaatgtcttttcaacataatcatgtctttcaccggcaactagaacttgtgaaccttcttttaatatatctgttaaaagtaacattactacagcataacctttgctatctgcttcgctcttcatgtaacttaacatttcatcttttaatggcataaatccatcgatgtccattgtgtttacttgagctactccaactcttgattctcccatattaaaaggcttaaagtcttgattaaatatttgagatacagtctttccttttaaggaagttccagctttaaacatctcttttgcaaattcttctaaacttgaaataccagctatttcagccaacttatgacatatgtctttatcttgttctgtacaagttggactcttgaataataaagtatctgaaattattgcaccacataataatccagcaacttctttaggtggtgttatattacgttcaaaaaagctttttccaactatagttgaagagcttcctagtggttcatttctaaagaatatagggttacttgtttgtatatcagcaactctatggtgatctataatttcaagtacttcagcatcttctaatccatcaactgattggcctctttcattatgatctacttgaataacttttttcttatgctttgaaataaggtgatatcttgagactgttcctattactcttccatcttcatcagttacaggataactgtgatatctagtttcagccataacatctttgatatcatcaactaaatcgtctttagaaaatgatattaaatctttagtagccataacatgacttacaggtatactttgaattaataatcttgaagctgtgaaagaatcatgaggtgtacttattatagtaactcctttttctctagctttagaaagtaaattctcagcaagcttatgtgctcctgtaattattattaatgatgtattaatatcaattaaagcttcttgtacatctggtctatctcctacaatagcaatatcatctttatctacaatttcttttaaactatctggttgcattgctgtaactgcaatttttccagggaatgttttgcaattttcatttatatatacactagtagcagaaagcgtatctaatatattttcaattgatgtattactttttcctaatatattattatcccatatatccataaatgatgaagttaagtttgaaatcgaaagaattcccactaatctactatcatttccaactacaggtagtgatttcaaatgattgtctctcattatattccatgctgcttttaaagaaatattagaagttataggtccaattgtatcaatatctaaatcttctacttttaatctaactgtttctaaaagtcttggagccttaacaccaaaatgatctaatataaattgtgtttctgcatttacatttcctaatctcacaggtatagctggaatattaccagtcttatttttaaactctgcgtaaccatatgcagcacaaatagagtctgaatcaggatttttatgtccagttacgtaaactacattttccaaaataattcctcctaaattttttgttttactttagtacattaggcacacgaaaataatgaatttgttatttttttgattgtgccttatataaattgacatattagaacaagtatattacttaattcacacatatttattttacttataaagttaattattgtaaagcgttaattgtatttacaatattatttacaaaaaaatactctgcaaataacttctcctaactgaaaaaaaattagatatatttgttgaatatattaaagatctcactcttcattcttcaacaaacatatatctaatttatataaaacttacaatattcttattttgattatctcatattatttatcatactccaaagatcatccgctgtagttacagcctttgaactaagttgaaaagctctttgtgtaagtactatatcagaaaatgtctcccctgcatctacattcgaaccttctaacatgccttgttctatattatagttactacttaatgtaacttgtgcatctgagcttggaacaaaatagctatttcctataggtataaaactcttatcacctatagctgtaaatataggaattgtccctattttagctacttgtccatcaacttccatggatattcctccatctttatctatagacatcttctctctatctaacgctggatttccttctgaagccccattttcatattgaacatatactttcgttccattcgagtctactaaagctccatttgaatctattttaaaattaccatctctagtatatactatgcttccatcttcctttgaaagtgcaaagtatccttttccatctattgcaagatctgtttttccacctgttgttaaaagattcccttgtttgttgttagcatagtttacccctagtttaacaccagttccagtaattgccttcttttccacaagtggtgttcctcttctatcaagtgattcagttaacaaatctttaaaatttacatccgtactcttataacctgttgttgaaatattaactaagtcattagaaagataatctagcttctcttgatatgcattcatcccactctttgctgtagcaaaaatattaaacataattttttcccccttacactagaagcaatcaaaaaaatgttcttaatcactttgaacattctattttctctaatgtgctttattctactatactcgacctaattcacttgcagctttttgtactgtttcatcctgcatttttacaaacttttggtttgtttcaaattgtctttttatttccataagttttactagttctgttgacggatcaacatttgaactttcaagaaaattttgtcttacatttacttttgcattataaataggattgtccatagtactataattatcaccaattggttctaaattattataattttgaaagtctgctgttaataacttatctacagctccaactccctcgatattaatattattgtcaccgtctattgaaaactttgaatcgccaacatatattggttctcttgcacctgtagagttatttattcctaatacttgtgatccatcgtttgttattagatatccttgattattgattttaaaatttccgtctcttgtataaacttctttatttccattttgagctacaaaaaatcctctaccatctatagcaaaatctgtcatgctatctgttgatttaaatgctccttgtgtaaaaactgtttcaacatcattaacttttacacccatatttaaatttccaatgtcatttttaacgtatttatctcctacaagcttttgtctattagatatcatcacgtcctcaaagctactttttgtaagctcacgtttcttatatcctgtattattaacattagctatattattagttactacttcctgatcattttgaagcgctattaatcctgaaacagaagtatagaatcctcttatcactttaattatcccctttcaaaatagatttacgttcactttcataaatcatacctaaggctctagccttttcctctatctggctatccgaaagactagcagtatatttatatccaaacataaatataactcctaaaaccaatcctatccctatacccaataagatcttcctatccatgagaaatataaatttattttttattttttgaataagccttttactaataatacttcccccttactcacagataattcgcggcatatttcatcttctgttaatcctgcatttaaaagtctttttatgctctgagtcttgttactatccgcactttctgaaaaattgatttcagatatcactccaatttcttcgtctatatcagtatctgttaaagattcagtatattcctcatctagctccattatactatcatccacaatgtacagccttttagatttcttatgatcttctgtatcctctctataatttatactgtcatctatatcatatttatctagaaactcttcaatttctagatcttctttattttcggatccttcttcaacattcttaagctcttttaagtcaatttttattttaataatttcttcctgtaattcagttagactttctgcaatatctcttcttaaaagtcctatttccattttataatcatttaattcctctttactatcttgtaatacactttgaaatgatatatttaatgtatcattttctttatttatgttattttctcttttgatagaacgataattataaactattaaactgaatcctattatcagtaatattaatggcataaaacacctctgtttaatgcacaatgcttaatgctcaattcacatttcacaatgcacaatttattatgtcacacttcatgttacattttcacaattcgaaaatatatttcattttttaatcacatagcaaaatgtaattccaactttttatattccagtgcttaaatttttaacgattatctacaactcacactctcttttaacctaactaacacatatatctctgcacaatcttaattatgcaatttgaattgtaacttggacactgtgaattatatattaatcaatataatgcaattttctcatgcattctctcaagctactaatagctctactatgtaattggcaaactctagattcagaaacgcttaataccgttcctatctcttttaaagttaatccctcataataataaagatttaatactattctatctttttccttaaggagatcaattgcctttgttaaaatctctagttgctctttatcttgtaagtaagcatcgggacttggactatttttatcttctataattccaataaggtttacatcttcatcatctgaaaaaattacattttccagtgataccattgaaatataatttatgtaattttcaatttctgctacttcactcatagatataccaagatattttgcaatctcatcatttgtgggttcccttaatagttctagctgtaatgtatctaccgctttattatatttatttaatttgtccattgcccctttagatattggtctatttctcctcagttcatctatcatagcaccttttattcttatagacgcatatgatgaaaatttcattcccttcgtatcgtcaaacttatttaatgcatccataagtccaaccataccgtaactaactaagtcctcatattccatatatttgttctttccaaacataacccttgaggcaatatactttactaacgggatatattcttgtattatctgctcttttccatcaacgtcttttaacgcgtgcatatccttattacctccccataaactcattttccaatgtatattcgtaagatatttaagtagtagctctttgttttctcattatctcaaaaagctcttgaattattttttcactttgagctggagtgatatcaataaatcttagtccacacaatttttctttatctggagtattttcaattcttacaatatcgcacttaatttcgacttcaattttgcttaattttaagctaaccaatatcaaatcttctttaacaatttcttcatctattttcaatttcaatccaccagcactcaaatcaaccattaatccatctttataaggcattttagaaatatcttcctcatcaatatctgtaatcttcttatactgtacctgatttaacaatccaactctaaaaaaattccttctttgtatttttactatattaaagggatttgagattctataatatattatgcttccttctttgcctcttgaaatcacttcgcatgaaaaattaaaacaaccattttcacttaagtaagtattcatttcaataatttcccctgtatgaagcattaaataatcaccatcgcaaacaggaacatttatttttaaaaagtcatcctctacatccattattagagctttatatgctttttcccctctcattacttccactctatcattaactttcaagttaaaattaagcaccttaaaatcctcctatgaaaatatattaaataatcttttaaacatccctctcgctccatccactgaatctacttcttgtcctaaaagctttccagctattttttctatatctttggatgcgtcgcaattagggtataacacaacaaagggtttttgttgcttaacactttgtactaattttttatcttctaatatgcatcctaaatattcaacatcaatcttcaaaaatttagtaactgctctattaaacttattataggtttcttcaccttcttctttagtaagtgctttatttacaatcacttttgccttactttgaagactatagtgatctgttgatttaatcaaactatatccatctgtaagagacgtaggttctggagtaattacaataatcaactcttctgatgctgcaataaaagatagaacatctttatttactccagctcctgtatccattattatataatcatattcatctaacatttcgagcttttctataaataatttcttttgatcctcttctaattcttgagccttacttaaagcagatcctgctggaattaaatctacgccattggttcctgttataattatatcctttatttctaaaccagtaaatataatatcaaatatattatatttgggatataatcccattaacacatcatcattccccatgcccaaatcagcatcaaaaatcaaaactttctttcctttgttttgaagtaatattgctaaatttacaacaaaattactttttcctactccgccttttccagacgttactgttatgatttttgtaggtgttttccttatctcctgttcttcattgttaatcaatcttcgtaatgattcagcctgatctagcatagaatctcctcccctaagataaaactagcaacttcttcctttgtaggcaccattatatcatctggaacattttgccctatagttataaaactaactggcttattagcaattttagcaatattatataaagagccatatacagtagtttcatcaagtttagtaataataatattatcatattcaagttctgaatatcctgatagtatagattttatatcgctatttttagtagttgcacttattaccatatttacatgatcaggatttgctttttgaacaaatgctctaagctctgaaatttgcatggcatttttgctgcttcttcctgtagtatctataagaacaacatcacagttattcatttcttcaatagcatcctccatttccttcattgtaattacaactttaaatggtatattcattatttctgcatatgttttaagttgctcaatagctccaattctatatgtgtctactgtaattaatcctaccttctttttttcaataagtgcaagtctccctgctagctttgctattgtagttgtcttaccaacacctgttggccctactaatactacgcgtccactcaaacttttagtagacactaaaatatctcgctcaaaaacttctctcaaagattctatttcatctaaatccttgccaatattcactattgactccataacttcatcttgtagcccttcatcaatatccaagttttttaatctctcttttagaaaacttactgatacatcttcattagaagaattttttataactttatttaacaagctctttaattcattaacttctttatgtattgattctatattggcttcattatttctaacattatcagtatagcatatatcatttttttctttaattgcattatttaattttatgacactacttttagtttcctgtttatctataatctcttcatacctgttgctattagttacttccttttcaaaattagcattatgctctagtatcttatcacttattgtattaccattgttagtttcccttaccccttttgaaactaacacttcatcttgcattaactttttaatgctttctaatgaattttgaaattcttgatcccttttactgtacttgctgctatacttattagaactaccattatcatcactttgtgaattttcaatggctgctgtaacttctattgctttcttagaaaataagccttttaatcccggttttctaacttttctctggcttattataatagcatcttttcctagttcatatctaatccgagtcaaaccttcgttcatatttgctacaagatatttctttataatcatctatattcttacgactccttcactattaatttgaacatcgttaggcacttcatttaaagaaattaccataatatgaggaaataccatttcaattaattttctaaatacagttcttatatttggtgaaacaagtataagaggttgattgttgtaaaaataaactgactctacagtattcttaattcctgtaagtatcttagtagttgtatctgggtctaccgttgggaaagatccttgaactgacttctgagtattgtttgctattatttcttctataaccggatctaaggttactaccgtaattgttctattctcatcaactacttggttacagatagttctagccaaggcaaatctaacatattcagttaaaacttctaaatccctagtatttttagcattatccgctaaggattccattattgtaacaatatccttaatcggaactttttctctaagtaaattttgtagcactttttgaagttcgccaatacttagaagatcaggtataagttcttcaacaactgcactatatttttcttttgcattatcaacaataagtttaacttcttgtcttccaagtaattcatatgagtgactctttatagtctcagttaagtgagttaccattactgttgtcggatcaactacagtcaatcccttaatttcagcttcttctctttgatctttatttatccaaactgctggaagcccaaaagtcggctcaactgtttttataccaggtatctccgaaccttctcctgttggatccatgcaaagaagcatacttggcattaattccgaagaaacaaccatacttcctctaatttttactatatactcatttgtccttaattgaagattatctctaatccttataggttgaacaactattcccatttctatagcacattgtcttctaacagatgcaattctttgaagtaaatccccaccagatgcctcatctgcaagaggtataagtccatatccaatttcaacctccattggttccactgaaattaaattcataacattttccggttctttacgctctgcttgaataatttcttcttcttctgatacaaattcctgtatctctttggcagctgcatctttataaagcaagtatgttaatgcacccattgctaaagaagccgtaaaaaatggaatcttaggcatacttggaactattcctaaaaataacattatagcactagcaattcccgtagctactggaaaggctgtcaattgactagacaatgtatttcctaaattttcttcacttcccgaacgtgttaccaaaatacctgaagccgtagatactagtagtgctgggacctggctcacaagaccgtctccaacagataaaatggtatatgtttgagcggcagtcgcagctgtcatatttttttgaagcactccaataataattccacctattatatttataatagtaattacaatccccgctactgcatcacctttaacgaactttgacgcaccatccatggctccataaaagtcagcttctgattgaaggtcttttcttttcttcttcgccatagcttcatctattattccagagtttaaatcagcatcaatactcatttgcttacctggcattgcatcaagtgtaaatcttgcagatacttctgcaactcttcctgcaccattagtaataaccataaattgaattactactataatcaaaaatattataataccaactacataattaccacgtataacaaagtttccaaatgctgttataatagttcctgcatctgcttctgtaagtatcagtcttgttgatgatatattaagcgctaatctaaatagcgttgtaaccagcaataatgtagggaagactgaaagctgcaatacattagttgtgaacattgtaattaaaattatgattattgaaattgttatatttaaagctaaaagtaaatctattacctgtttaggtaaaggtattattatcataagaactatagctataacaccaaatgcaattaatacatctagattgtcttttacctttaattttctattgcctaattccaaagatcaaacctccctttcttgtcaactcacaattcaaattccacaatgcacaattacggctaaaattcttgcaatatatatattagaaattgtgaatggtatatcgtgcattgtgtattgtgcatttaaattttatttcttcttaagtttcattactactactaaaatttctgcaacagcttgatataaatcttgcggtatatcctgatctacttccactctatcatacataagccttgcaagtggtttattttcaataacaggaacctcattctcttttgctatactttttattttaaatgcaacataatcagcgccttttgctacgactttaggtgcctccatatcttttccttcttcatattttatagcaattgctaaatgagtaggattggttattacaactgtagcatctgcaacagattgcatcattcttttcattcctaactctctttgtctttgcttaattttcccttttattttaggatctccttcagattgtttatattcatctttaacttcttgcttggtcattctcatttctttattatgcattcttacttgaaggaaataatcaattcctgcaataataactaacacaatgcatatctgtttgaaaattcctacaactaaatttttaacttcatcgcttaacgaaggtagatataaatttgagattcccagtatactttgatagtttcctgatatatatttataacaaataattgatactatagttattacaactaaatttttagataaatccactatacttctttttgatatcatattcttcaatccactcaaaggatttaactttccaaatgatggttttaaaggttcagcagttattataaaacctgtttgaagtaaacttgcaataactcctccaaccattataggcaatgcaaaaggtaataaataacttcctatctttataacagtagtaattgccaaatttgaaatagttgcatgattaaaatctcctatcattggaaaattaaaaaaatagattaaaacctctttaaacccatttgttaacatcccccataaagatgatattaataacgtacaaataaccattgtaattgctacagatacatccttacttctggctatttgacctttatttctagattccgactttttcttaggtgttgcctcttctgtcttatcatcaccagcaaaaattaaaaccaaaggtatcgcagatatcaaattaactatttcccggaaaatacttggtaaattgtatatcgctgttccaattaacttcaacattagtggaagcaatataatatatgtaataagtcctaataaattttttataggcattcccaaaatcataattggaattgttggtaccgttctggaaattaaccccaagcatacatctgttatgacaattatcaaaactattggtattgctatttttacccctaaagtaaaatagtcaaaaatagtcttcataacttccattaatgtttcttggtaaacaatagtcttaccaataggtattatttttgtgctttctacaagcatatttataacgacatgatgtccatccactataaaaaagaaagccaaagaaataaaatacgataaatttccaagtaaagtcgatgtagtctgcgttgtcggatctaaaactgataccattgagaaacctgcatgaatatccatccattcccctgccagctttaccacctggaaaatcaaattagttatgtatcctaatattaagccagacattatttcacttatagcataaaataccagcatatagctgctatttacagcgctcactgtagaatgatctataccagctacaattccaaatgataatataagtgaaaatactccttgcataatctgcggagttccagtcggaaaaaatatttgaacagccataaaatatgaggttattctcaaaaaaattagaaacaatgcaagaaagtaggatatatccaccatactgtcctaccccctatgtaataacttttgaaatcaaatcaaaaatcctgtttgtgaaagacataattgtttcaagcatccagcttcctaaaaatattccaacaattgctgctgctattaatttaggaacaaaagttaatgtctgctcttgtatttgggttgtagcttgtataatacttatagctaaccccaacactaaaactactattaatataggtgctgatactttagccgctgttattattgtatccttaactacagcattaagcattgtctgcgtcatcttatttcacctcacataaaactctgtattaaagacttcaccagtaaataccagccatctaccattacaaataatatcaatttaaaaggcaatgataccatcgtaggaggtagcataaacatacccatagacataagaacactagataccaccatgtctataactaaaaacggtaaatatattaaaaatcctatttgaaaggctgtctttaattcacttatcgcaaaggctggaattaatgttgtaaatgaaacattctcttttgttaaattctctttatctactccacctatttcaacaaataactctaaatccttttccctcgtttgtttgagcataaatgctttcagaggtttagatgcctcttcaaaagcttgatcctgagttattttattttctaaatatggttgtattgctttagtatttacctcattataaacaggttgcataataaacaaagttaaaaatatagcaagccctgtcaatatttgatttggaacagcttgttgcactcccattgcactcttaaggaatgaaaataccactactattctggtaaaggatgtcatcattatcactattgatggcaataatgatagtatcgtaaaaaatatcaatattttaatactcgatacataatcctgtggcgtgctatttccgtctccaaaagatacatttagttgcggcacgcttgtactacttggagctgctgatgcgcttatagtgcaaaatatcataatcccaagagccatcatgaatgtaaatgcaattctctttttattatttttcatgcttctcttcctttgattttatattctttgtaatcttagaaaagttctttttcgattttaatattaaattagtataatattccgccatttcctgcgatgctttctttttatcttcttcaatattatcaatttcttcttttgataactctgataatttttccatatgccctgcagtactagtcattatatatcctttttccccaattttcactattaatatagaattatcttttgttacttgtaccctttcaataaccttcatatatttattactattgataacattaaattttgaatttgctaacttaaaacttaaaaatattaatcctaaagtaactcctaaggctaaaataagttgtacaatcattcctaaaaatccaaaattcatatctattacctactgaattatcatgcttttaaatctaacatcagtaatcttgccttttgttaaatccttattaattgaatcaattagttgtttctttatagcttccctattagctacattatttaaataatctgccttttgactcttaaaataaaatataatatcatcccttacaactacttgattagctgttaattcttcctttagctttgctttagtcttatcataccctaaagcaagttctcctttaaaaaatcttttgccaccctcatcacctaaatttactgtaaattctgctaagtccatatattcattttcaacaacaacttcttgagcatctactgttttctgagttttaaaaaacaaatacattccaccgaaagctgccgatccaagtactaataatcctaaaacaaataaaactatcataagacctttgttacttttacctgacttttcacctttttctttttcattaccttttcctaaagccactattaccactccttaccacttgcaataattaaagtattaaccttcttattactaatttatttagctaaaatcactataatcataccttataagtaaaaattttgtttttgtattttataacggactgtctaacttcttctacactttcaagcactatatattttcttccgttagttaatgtaattattgtttcaggcacttcttctattttttcaatatgatctgcattcaatataaagtgctcatggttcataccagttacgtctatcataataaaattctcccccctttaataattaactgtacagttcacaatacacacttaactattattatattcactatattatttaaagtatataggtttttgataatacaataacttaccaattgtgcattgtgaattgtgcactataaagcatattactgataattaaaatactctattgatatcttattgcaagttggactttctgcccaacttgctttaatataatattacctatacttttatgatataagttatctcatcaatccagtaattgtttgaagtatttcatctcctgtagttatcatcttagaagctgcttggaaacttctagttgctgtaatcatatctgtaaattgttctgttaaatctacatttgaaccttcaagtgctccttgaattaaggatccaaaaccaccttggttaccagttgcagtagttgttgatgatgatgtactagtatctacctttccagttttgtaaactatagggcctgaattagaagaatttacgcacatattaccaccaaggtcagtcaatccttctggatttttaaaacttgccatagcaatttgacctattgcagctctcttaccatctcctaatacagccgtaataataccatcttttccaatttcaaatttcttaacaggttgtgttactgcatctgctgcacctggtgttcctgaaatagtaacactatctggtataactaaaggtctcatcgtgctgtcagacactgttagctgcttagaatctgcgtttacataattggcatttataacattatttgttgaatcatatgttaaacttttagcattatcagttccaccatcatttttagaggcagttaagtaatatcccataactctatgtccatcagctgttaatagatttccttgataatcaagtgtaagatttccatctcttgtgaacaaagtttctgaaatttctccagtagcatcggtagctgctgtatctggtgctcctgtactttgattagcaccaattccagaattcaaatctcctttagctactactaagtatccatcaccatcaatacatacatcaaggcttctgcctgttgataatgcattaccttgtcccataactttgttaatacttgaaacttgtgcccctaatcctatctgcttagcatttgtccctccaagtactgaagtcggtgctgttgcctctgaagcattttgataaagcatatccttaaatcttgcacttgaagatttaaatgctgttgttcctacattggctatattattacctataacgtctaatttagtctggttaaccttcattccacttatcccagaatacatacatcttaacataaacatacctcccaatcttttttcaataataatagcttgtctctatcgttcaacaagcctcggcttccctttaggtccagcctattataaaattactacgctatctacattcgtaaatatattatcttttgctctatccttttctacagctgttattaaagtcttattttcaatactagcaattaatgcaacatctttatataacataactgtatttttagaatttctatcttgagctattttaaaccccttttgtatttgttccatatcttctttagtaaaattaatctcatttaatcttgacgcagcatgttttgatacagtaaaactctgctctttacttttagcactatccagtacatcctgaaatcttgcttccttctgtttgctattaggactataacctatagccttttgagaatttgcaaattgtccgatattccctaccgaataagcttgcccattaataattctataactcatttatacacctgctattttagctagaattgcattttctgcagctgtcgaatcattagttgcacttgaaattgtatttattgttccatttgaagatgcactcgtagtatcaccttcttttactgtattagtagtattattgtttgtagaactatttgctgtttcactatttgtattagcacctgtagaactagaatcagaagttgttccgctgccactagaattactgttacttgaactgtttgtagctgtttcgcttgtacttccattagcagtattgttatttaaatttactttcatatcatcgtctgctaggtcaccagctcttactatatctccataatcataagttttagtctctcctgttggtttaccgttatcgtccaatatatcaacttttatctttacagtaggaccgctgacagtatcaatataagcaccagtaatctttccttttattaaaacagtcttcttattatcatctacagttgcaatcacaactttttcttccttgttagctaaagctgaagcagctaagaaatcagaattaagagcagttctactatttgcattagtatttgaatcatttgtttgtacagttccaattatattttcaactgcaatttttgcttcttttccattaactaacatgttcaaatatgttccaccagattcttttaacacttgagttacataaccttgtatatatgagccattattgtctttttcattagttattactgttctaccaaccatttgctggtatgatgaatctgacatagtagtatttaaattctgcatttgttccattgatgcgaattgagccatttgactcacatatgcactagaatcttgattttgagttggatccaaattacttaattgagccgatagtatttttaaaaatgaatttttatccatggtattatccgttttccttaagattttggttcctctatcagttgtgcctgaactcacaacattcactgttgaatcatttaatggacttaatttagtgctcatacttatgcctcctatgcaaaaaattctatattattatcattagctccaatattatccactaaatcttcttcactaccttctaaatcatttcctgtattactatttctagtattgttccttctttgctcctctgaaagctgtccactaaaactttgttcattaaaaaatgtagtatcatcttgataaagctcaatatttacatctgctattttcaagttttgctctccgagttgctttttaatatctgataagttttgtgaaattaaagcacttgtttcttttgaattagcttttagattcgcttttattaaaccatcctcttgaaccagctttatagttatctcgcctaaatttcccggattaacttttacagttaattccttaagtgaattagtgttcataaacttaacatcttttattaaatcatcagcaaaagtagctttattaattgtaagccctctagcgttattcacactttgattctgtattgctgaagttctagatgcaaataagttaattttatttaaggagtcatccttattatcatcaactaatgaatttaaaaacttttcctcttttgaaactgtcggagtattattttttgatgctgaagaatcttcactttcactattatcttgagaataatttttacttaacatatcttcaagtgttaaaactttattacctacattctgcttattttctaacagatcggatatttcagacattattccttttaaattacctttagtagattctgtagcattttctttaatattataattcaaatttcctaaaagcttttctattaagttcagagaattagaatctagcttactctttacagaatcattttttagtaattccattattttttccataataccatttaaaccactattagatgatgtgctgttagtttcattaccccccactttagaattaattactcctttttcacttatgttatcttgttttatccctaatttagaaagtaagctcaacagttctgataatatgtccttcattttgtcctctgacgctgatttactttctttttctaattcctcaagcttttcattcaattcatctgtattattaatatctgtatcttcaacaccagttggattttgtttttcatctacagttgatgtactctgagtattgtcttgaactttggaatcactttctgattttaatacatttttaaaatcatctttcttagaagtatagccattagacgacgccttgctagtttcaaaagaagatttactcgcctttgtattagaagtaaatgaacttaacattctatctaaactatttgatgaatcatttgaaccttttgtagctgtaaccattattttcacctcctttcaagcagtttaatgatatcaattgaaatatcattcagtcacatttgcatattaatctgatattatattgatatttctaattattctgattcctcacatatgcataaagagctaactcatcaatattgatttgctctactctatcttgctcctttacatattcagaatacttcttttcttttaatgtctgaaccgtttttctttccatctgcttagctgttaaatcttttcttctattttcaatctcctgatttttgacagccagatccttctctgtagatcttattccactttgaactccctgtatgtagtatctttttaatttctgatatacaacatcctcattgggagatataccactatacttttgataacttaccttaagctcctgtaatctttcttcgatcctctttttctctctctgactttcagtaaataatcttttactttcttcttctttttctcttctaatttcgaggagcttttctaagccaaacttaaacctctcagccaaaatcccacaccttcttcttacaatccacaattagaaatttatcattgagcattcgtcattattacttcaaatgcagcttttcacttcccacttgtaacttaccgttttgaacttgccacttatatctgaccttggttatctaaacattgatattaaagaattttgtgtaccctcaaaagaagttctttcgtcaattccctgacataggaaatcatttaatgaatcattgtagttgattgccatatcaatctttttattacttcctttaacataagcccctatatttattaaatcctcagagtctttataagttgccaaaagatctcttgccatagatgcagcttctttatgctctttaggcgctatagtgttcataagtctgctaacgctgtttaaaatatcaatagctggataatgatttttatgtgctaaagatcttgataaaactatatgtccatctaatatccctcgaacagcatctgctataggctcattaaaatcatctccatcaacaagcaccgtataaaaggcagttattgaaccgtctgcagatgttccagatcgctccataagtttaggtaacttagcaaatactgaaggcgtatatcctttagtagctggtggttcccctatcgcaagtccaacttctctctgtgccattgcaaatctagtaactgaatccatcataagaattacttttttacccttatctctaaagtattcagcaatcgcagtagctgtcaatgctcccttgattcttattaaggctggcttatctgatgtagcacacactacaacagattttttcatcccttctggtcctagatccttctctataaattctagaacctctcttcctctttcacctattagtgaaataacattaacatcagcttttgcttctcttgctatcattcctagtgtagtacttttaccaactccactacctgcaaagataccaattctctgtccatctccacaagttaaaaaaccatctattgctcttactccagtaggcattatttcctttattctttttctctttaatgggtctggcgcatcattttccagtggatactcttctccatccatagatatactgtcgcagtctaaaggattcccaagtccatctataatatgaccaagtagcttatctgaacattttacacttaacggcttacgttgtggtacaactctacatccaggcgaaattcctattagttcatcaagaggcattaatattacaaattcatctctaaagccaacaacttcacaatttacaggaacatttttctcattatatattatgcaaagttcaccaacaaaagccttaatgccttgcacttcaatagtaagtcctattactttcttaacaacgccttcactatatattgtcgaagcatcacttgcttttttaataattttatcaaaatccaagtctaaatccagcatttagaactactcctttacagtcctcaatgcacagctcataactcacaattattgataaaaccctacaaggattttttaattttcaagccttataaaaacttgttcctcaattgtgaattgtgaattgtgaattgtgaattatttatcctaatattacttttcgtatttgttccattccaatatccaagcctacttttactataccgctgtttttttctaaaactgcatttccaggttccataaaatcatctgcaagcacaaaaatttcattttttatattgtatgataccttccatctttccacctgcgattttaattcttcaacatgggttgaatttacctttaaaataacattttcttctccttttgagatcttaaaagcttcttcaataatgctgttcatagcttcattggtacttagtgttttctttgtaatatttccagcaatttctagtgctaaatttactatttcatttttcttactttctagatatctctcgtagttctcatgagcagattttaacatcaattctgctttgttcacaatctcttccgcttccatccttgcactatcaattgtttcatcataagctttcttatatccatcatcatatccattttctagaccttgggcatatcctttttcatatgcttttttctctgaagcattggcatccatttgtgctcttaacacaataatctgcttttcatttttagcatcctgtattatcctttggccaatatcttcatatctttttaggagttcctcaggatcaatctgtggagcttttactacgatttcatcttcctctttaacttcctcagatactacttttttactaatatattttgttgaaataattttactcgtgcctgattttgcaaagtccttttttattagtctatacgatgattgcatcttctccacctcttgcaatgatgatttcattagcatcatctaatcttctaataacagaaacaatcttctgttgtgccttttcaacatccataagccttactggtcctaagaattccatatcctcttttaaagaagcagcagctctcttagactgattcctgtatatagcatttgcaacttcatcagaacatcctttaagtgcaagtgcaagatctccaacttccacttctcgaagaattctttgaatagatacatcgtccagagaaagaatatcttcaaatacaaacatcgagctcttaactttatcagctagttctgcatcttctctttctaatccttctgtaatattcttttctgttgttctatcaactgcatttaatatattaactaatgtttctactccacctaaagttgtcatttctgttcttaccactgaagataacttaccttcaagtacagattcaatttctttaattaccattggagaagtattactcatggtagctattctataagcaacttcactttgtgtttcttctggtaattcagccataacctgagctgctttatctggctgcaagtaacataaaattaaagctatggtttgaggctgctctgatataattacatttaacaattgatgagaatctgccttccttgcaatcgaaaaaggtctatactgagcagtcgcctcagatactttatctaatatttcactagctctttgagtgcctaatgcttttgataataatgttttagcgtaatccataccgccttcaattatataatctctggctttgttcatttgataaaattcatttaatatttcttctctttgttcagatgtaacagatgtaatattagcgatttcataagttattttttgaatatcagcctctggtaatttctttaatatcccagatgaggcttctggtccaagagttataaataatattgctgccttatgcactcctgttaattgattttgttcttttgccatagccatcacctctcattttcagtcaaccatgatttaattatttctaccacctgttctggtttttctgttgcatatctcttaatttcttcctctaagtgagatttttgagtttttgactcgaattctattggttcaaaaacttcatccgattctttaggtaatatagtatcatcgattaaagtatttaataattcttcattttcttctttattcttctttcttcttctcgcaataaagaaaataaccattcctaaaagtaacgctcctaaaactcctgcaacaatcatcatcttattcttaccagctgtagctgcctctgcattcatagcatcaatttctgacttagcttgatcttgagccgttgtgtcaaatgccattccaaccacagaaactttatcgcccctaagtgcatctaatccaattgcatttccaaccgcattttctaatgtctgttgtgttgcagcatctaaatttccatctaccataactgaggctgtaagccttttaacttcacctggtgcactaataactttagactcacttttgcctacttcataatttgtcttctggtcctctttactcgaagctgaaggattattgtttgtcgctgtagttgtattactcatattattatcaacaggactttgacttgtagcggttgatcctgaattatttgtttcctttgaattttcttgacttacaattactttattcggatctactactgtttgtgtcttttgttttgaatcaaaatctaaattcacattaacagtagccttaactttgcctttaccaacaattggctccaacaaactaacaatcgccttttgcatcctatcctcataatttttttcggcatcttgctgttttgatattgcttcagagcttaccgaattatttttatcagaatttatatccttagtaagcaaattcatattatcatctataacgtctatgttttctctcggtatgttttcagttgctccggacactagggctacaatagatttaacttgatcttcgccaatagttgtccccttttttaattttagataaaccgccgcttttccgggttctttatcctttacaaaaacagaatccttagcttcggttatatgtactcttgcttcttctacttgcggaaaactttttattgtcttttccaactcaccctgctgcattctaactttttttattttaaattcttcatctgtcattccaaaggagcttccgctatccattaattcatatcctttgctgccagatgttaaagtcggtgccagttccaaccttaatttatctacttgatctttaggaacccaaatcgtatttgtattactatctattttagtgtcaacctttttctcatttaagctattaacgaccgtttgagcatcggctgcatcaagatcagaaaatagtacttgatacttattagaagatgagtaaaaaattccacttataattgcaataataactgccacgattgctactattatagcagcttttatcttcttattcttggatttaaacttttccaaaagccccttaactttctctaaaagttttttcattattaagctctcctcaccttactacaattgcaatcttgataattgattatatccttccaataacttgtctctagtctgtgctagaaattgtagactcaaactagcctcttgatttttaatcatgacttcatcaatattaacatcttcacctttaataaactttgttgcagtttcatcagcttgtgtcattttaccattagtatcatccactgccttttttaatacgtctccaaaactaactgagttgttgctttcattattgctcttactattgtcaatatccttaaacttattattaaatatgatttcattatgtacaaaattatcttctattttcatttttcatccccctatttaccaatttctaaagcttttgaaaacatgctctttaaagcattaaaagtatcaacatttgcctcgtaagatctcgttgctaccatcatatctgccatctcgttcaatacattcacatttggcattgtaacatatccattactatctgcatctggatgcgttggatcgtatacctttcttaaaggtgatggatcattttcaattttaacggctttaactcctgccatatccttattagcatcaagagcctcttgaaatacagctacttttcttacatatggccctttaccatttgcacttcgtgtagtacttgcattagccatattagaagttatagtatccattcttaatctttctgctgaaagacctgttgcacttatttgcattgaagtaaatgcattcattcatacccctcctttatttaatcaataattccagttctttagcttgtctaaatatacttcttaaattatgtattgtttattactacttaataacagcttttaaattattaaatctattatttatatcagttattaaagcattatatttaagagtatttgctgcttgatttaccttctctatatctaaatcaacattattcccatcatttctcatactcgtactcttatcctgttcaattgatatactatcatcattatttgaattattactagaaaaatgatgtggattagtgcgttttaactctaatttcgagaaatctccctgattctttaaattttcctcaaatactacattaaatctcttgtaatccttcgtattgacatttgccatattattagcaattgttttagctctaacatttgatgctttaattccttgtttaatcaattcataagtagtatctgaactaatagattgtattgccataaattcacatccttatatttcgtcttttattttcataaattttcaaagttttcagtatagatatattattttgcatattatttgtaatatgcaaattagaatcatttttcctcataattttcatttaaccaaaatattacatttatttcaagtaattaataatctaattataaaataattattttattttatctatattttttcaaaaaatgttttccaaatcatttactaattccgttttttttttgttttattgtaacattatcccatatattgaatctttcaaactaaattaaacgtcatttttaggctttttaaatgcttatatccttgaaaaaccaagatctataaaatatgtttacaaaattataattacattcggctatagtcagtcatagaaaagatttttttcattgaggttataactgtatcagcatcttttataattaatccttccaaattataatacatcttagtactttttaccacattttttcttattttataaataattttgtataattatgatttatattttactttatttaatcattcaaatattaaaactccattgattttatgttaataacttatttttttattctttttgaatttcagaattgttgaacttggtatccagtattactatatcaactcgtctatttgcagctttcccttcctctgtagtattacttttaacaggtctgtattccccatatccaactgaagacagcctctcaggttttacatttccttgataaatcaaaaattctactacatttgaagctcttacagctgaaagttgccagttggagtgaaaataatctgtattaataactacattatcagtatgtccttcaactcggatataattatctataccattcaaaattttagaaatagatattaatttattttgccagtctggctttattgcagcctgaccactgttaaaaaatacactatcattgaaactaattataaggcctctttcttgaatcgaagtgatgacacttccttttaattcagaattgtttacaagctcatcaactttcttttttacatcagacaacttttctctctcggcatttgaatcctcatcagcatccgaatttgtagattctattacatctggtacagaatttgaattgtctgctaccgctatcaccttttccccattcccactattaaatcctattttcaatgaattggctagtgtcttggatttttttgtatctatattagaaatagcatacatcatcaaaaagaaaatcatcattaatgttataaaatcaagataagacaacatccatctttcagtatcatctttctcccttttcatcctctttttcatagacctatacctctatgattttcttccaaatcttctgcttcattttcggtcaaataactcacaagtttacttaccaatgtatttggattaacaccttcttgaataagtaatactgcctcgataatcatttctttttcagcaatttctttcttattaatttcttttaatttattagcaataggaatccaaaaaagatttgcagtaccaagtccatatagagtagctataaatgctacagcaattttctctcccattttagcaacatcacttaaatcacttaaaattataactaaacttgttatagttccaactattcccatagtaggagcatatccaccggctgatgtaaacatttcactataatcttcatgccttgctgaaagttgttctagcttagtatttaatatattctttacagaagccggatctataccatctaccaccatttgtaaccctctttttataaacggatccaaatcattagttagttcagactctaaactcaaaagaccatctcttctagtttttattgaaatctctttaaagtacaatatatgttctttcagatcactttctttttttctaaacgctatcgataacacctttggaaactttttcaatgttgttaaaggaaatgaaattcctatagctccaatggtccctccaataactattaacgctgcagtaggctgaagcaatgcaattggtttacccccctcaataacaaaacctactacgatgcaaacaaatgcaaataatatacttagtatagtcataatatccataagcttatcccccttaatatccagaaatttttctgcaacttcatcctttaaaataaactaattatcacccgattctacattattttcccaatataaaaagtgtctataaaaattataggcaccaaaataaaaccattattaaataaataaaaaatttattataattatattttggcaacctgacaatcatagaaatgtaaattcccttagactcatggctttgcggccttatctttcaataagtgtgctagtaacatttataatttttccatattttctataatatcatttattcccctaattttcaatctttttttccatttttaccaaaaaaaagaatgaatattttgatttcgccaaaatattcatcctttttcgttttcttgttatcttaaatacacatgttaacagtctttttatgcttttttaaactacctaatactagctaatacatttaaagcatcctgtggtaacttgttgctttgaaccattaatgaaatagaagcctgataaattatttgtgttcttgaaaactcaagagactcttgcgcaatatctgcatcttctatactacttagagcacttgtcagcgggccattcattccagaaatatcatctaatgtattatccagtctcgattgaatagcaccatatttacttcttattgagcttatagtattcccagcatcatctacccatttaagatttgaatttaatttagtcggatcattaacgtcgatttgatcaattccagttgctatattagtcaaattataaattggtatatctaccttttcatcaggtaaagctccaatagtagattgcttattattaggtgccgttgccgtagctgtggaatctgacattacaattccattaaagctagtattatttgctatataattcatatcttctttaattttatcaatctctttctgaattaccgctctatcttctggttcattagttccatttgcagcttgtactgttaattgcttaagtctagatatgttgttattcatttcttgcaacgcaccgtcaaacgtttgaagcattgaatttgtatcttgtatgttttgacttgcagcatcacgacttaataaatttatttttaaattttctgcttgagctatcttattaggattatctttagcagaattaagcttttttccagtactaatattattcatagcatttgaatttttcacaagagttcttttatagtttttatatattccttccgaaaacatattgtgacttaatctcatatatatatatctcccttctgaataacactatttatattttttatttccttgtcttagtctgtagccacattccccattacctgctatattctagctaaaattgtacttaatatacttactttataattcttttttattatcgaataaaaatttttgaactttaatctttagttttatctttattatttattaaatttctacaaaaaaatactggatttcaaaatttatgctataataataaaaaaataattatatggaggaaatatgtcagaacaatttgaatttaactgtaatggccacaacagtatttacactaaagattattttagaaaataattataacgaacgtaatttcaaagtctatttttctacgccagataatagagtaaattgtgaaacaggtttacttcttctcattgcaggatttgatgccaactcacaatccaatatctataaaaaatgagacaaaatttttcaaatttatataacctagtaacaattcaatgcgattatttcggttcagaatttatgcaaaataatttgcctttaaatttgagcaaggactctataaatatactaaataattttgatcttttcatgaatgataatgttattaatttcgataaatcaaaaaatataagagaacaaattagcctaaccgctacggcatctattagtgagtcaccagaaaattttaatgatatgtcatatatgcaaagtatcgataatattactgctgtataaaatgtaataaacattttatacaataacaataataacttcaatacaaataaaattattattatgggacagtcccaaggtgcctacctttcttacttatgcaatactatgtgtagaggcttatttactcatatattagataattccgcgtggacatatcctcactatttaaagtcactaagaactattggctcacaacttactgacaatacatacatttcagctactttcgattattttgctaagcgcattaatctaaatacagattatttacaactaagtaatttatacaaaaatatagacaattcatgcataataatttcttatcatggtacaaatgataatttagctcttttagatgacaaagttaacgaattaagtaatataaataatgtaactttaaatataatttccgatataaatttggaagatagtatttttaagaacactaatcacggtttaggggcagattttataaaactatttgatttcttttataaaaaatatgttactgatatcacacataattcattattaaactttgaaaataacactattttaaacggttccaacttagaaatagattatactaatggaatccctatcgtgatcggttttaataatttattctaaaagatagtggttgataagtattaccaaatacttatcaaccactatttaccaattattaaaattctctcaattatagagtttttaataattcttcaaactccaaatgctttgctccctttatataaactcctttgctacaattaatgaattgtacatttttgtaattgcttataagtaattctattttatttttaaatctaatatatccttctgtagtatttacaaattttccatccaccccttctacaaacttatttagataatttttcttcaaatcatctttaattccatatatttcttcaaaatctccgatatgagatttttctctaatgaaagctaaatcttgcccgagtaatattactttctttgttccacattttactgcaatatccatagccggaattgccacagttccgcctgttcttaaagtaatttcatcttcatcatttccattaaacatatactttggccctttataagcattcactgcccatctcgatgctctcgataaaaaacataacggtatttcctctttttcatagcctataaattgctttcttactgcctctgatccgtcaactattactataacatctggttttatctttttattcattaatgctcttaatgaacttcccacagcaataatattaaatttttctctattctctctcaatctatcaagttcaccgtccagggacggtcctgagcatactataatatatggcttgttagaatcttttaatttatttactacacattttattgatccatacttaagttttttattcgcttcataattttcctcttcgttttttacagtttctttattaatttcaagcgattgttttgaaaatgaataatcgtttattaaattgtatagaacctcattagaacttcttatagtatctaaagatggcttatggattataatatctccagctttggatagatactttgaaagattagtatagaatttattatcattttcaaatatttttatatttttattattgaatatatttttgttattttctctgcaacattttattaattctttattccattcaaaaacatataacatcgaattatgattcatctttcttgctatagcatcaatatgataccctaaccctattccatacactactatggttggcttatttatcaactccatattacctcttataaattgattactttcgcaaataggatcatacttactatgtatatatcttccattatatttaattgttattaatcctgattttgtttgttctagttcaatcatatctaattttcctctataattactaaatacacattttttctatttcttcttttaataaagttaccccattgatatttactagattcatttgtttacttatcattccttttctaacgtcaccttttattattaagtaatttaacaattctcttatttcagaattttcataggtatttatccactttccacctattataattccattttcactcatttgctttgcgataatttcttgattatctgccactacaactcctatagttggtattctcattgaacataattcatataatgttgatccacacgctgaaatagctatatcacattttttcatcaattcactcatgattggattcttatacaacttaatattactgtttattttgcttatctctattaattctctctccaaatcataatcaaaagccattcctattacaacatgaatatattcactataagtatcttttatttttctgagaattttcaaagtattttgatctttatccataccacctaaagttaatagtacatctgtgactttttctttacacattttattttctaatcttaaatttctaaattcttctcttatcatacaatatttggttcccaaaaataacttagttccaaaatttatattccttgagtaatccatatattctgcattaaaattttgattaattataaagctaacattcattttaattttattagtatcatcaacataccctgtatatttaaaatgtgatgctaatatattaaaatactcttcatttacctcataactatcggttataagtaactttgccctgtattgttcttgcagatttaaaatatcccctatcacattttcttcggatattgtaataactataaagttattctcaataattttttcaattccacttctatatttttctttatctgaacttgaatctctacaaagaaaaaacactttatgtgaactactaagttccttagccaaaacaagcatcctcattacatgtccaagccctatagaatttcctccatcagcccttataaaaataaccatcatctaccaccacttaaaaccaaacatatatagtaaaatttttccttatctcctgtaatttatgttatttacaaacatcattaatttcaattaaattccactccagaggtgttcctttttcataatcctctttaaatttttttcctaatatttgttctataaatttaggtttcatcccatatcctggtctaattgatctcacatttttttccgttatgatatctcctttacaaacatctttgcatataaataacgatctgctaaactctctatttttcaatgatttctccgataatgtataactaacttttcctaatgccttctcaatatctctaatagatttgaccatttccataaattcttttacatttaacgaaaatgctgaatccggccctcccatgcttctgtccaatataaaatgcttttctattacctttgccccaatagctactgctcctacaggaactgttatgcctaatgtgtgatctgataatcctgatacaacatcaaatgtgctagccagattaggtatggtctttaaattcatttcttccaatttagctggatatgcactagtgcattttaataaaattatttctctattcccatttttctcacacgcttcaactgcatcttgtatttcctgaatagttgctattcctgtagaaattataactggctttcctttttgcgctatatattcaatcagtggtatgtctgttatttcgaatgatgcaattttataggctggaacatctaattcttccaaaaaatcaactgctgatctatcaaaaggcgatgaaaaacatataatgtcttcttctttagcaacattcatcagctccttatgccattcccaaggcgtataggcttcttcgtaaagcttatgtaaagttgttccatcccaaatagtaccctgctttatttgaaagtattcattgtcgcaatctaatgtaattgtatctgcagtatatgtttgaagtttaactgcatctgcgcccgcttttttcgcttctctaatcatcttttttgctatctctatatcatgattatgatttgctgatatttctgcaataataaatgtattagattcgtttgatattaatttattagctattaatatttctttcatatcagtccatccttattgaaataatatttaattactctttaaattttctatggtaattttacaattgcttctccttctattacagttatctctttttgatttttaactatcgtttcaatctttgctatttttttatctgcaataatttcttttatagttacagtcgcagttattgtatctccaatgtaaactggcttattgaaagataaagtttgttttagatatatcgttcctgggccaggcatatacatccctaacacggtagaaataaatgagcttaccaaaattccatgagctatgcggtctttaaatatggatttttttgccttttccttatttacatgaattggattaaaatctccagaaatacctgcaaaattatatatatcatattcgcttattgtttttgaaaaagattcactttgatttaaataatacttcatgtctcctccatttattcgatatatattttttcatatttataattatgttttattctattccaagtgtctattgttattcccatacatacaatattataaaatgtattgtttttgcaaatatgttgctttaatattccttcaatctctgttccaaatttcttgtgaatctctataacttttctattaaactcaaatacttcgcaacataacttgttcaactttaatgtattaaatacatagtcatacacattacattccaaaattgtagcaattcctcgtcctctaaaagatgtatttcctatataatatgcccatgagcatcttctatttacattatcaatgtgattaatacttaatataccaatcgaagtattgtctatttcaattatccaatatagttccttatcatttttttctattttagcaagccatattttctgttcttcaagagttaaaattggatcagtatacatatatttcgtaacttgcggcatcattctccattctattatattttccaaatcattttctttaatttttcttaatataatccccataattattcacccaacttcttttgctctatttctgcattaaggttctctatttgaggatttttatccaaaaactctaccacatcttctaataaaaaatatccttttttattaaataaattattatatatagcgcttataactaaaaaatcttcttctgtatcaagagttactctatacttcgaataatcttttgtatttttataacattctatgttaaaattattattcaaattatatatatatggagttacatgttctctttcataatctttttttgcattattaaaagcaatttctaaagctttaaatgaaaatacttctatatcatatcctcttggataagatttctgtaatgtgttattcatataatcaagcactttgctctttttcagaaatagattaatcatattagttaatatattttgatctaaacatggacaatcacttgttattctaacaattacatctgcattattttccttagctgcaaaataatatcttgaaagtacatcattttcagaacccctaaagtactttactcctaacctattgacttcatctataattttatcatcttgtttctttctagtcgtagctattattatttcatcaatattaggtactaatttcactctgtttacatcatgctcaagcactgtcttaccgcatatttctttaaggacttttcctggcaatcttgttgatccaactctcgcctgaactatacaaacaactttcataagtattcctactttctataacctttatttctctccatcataacttctaatgataaaaaattatctattcatatttttcataatcataaatatttagtcttttcatttctcttcttaattgttcagacgttaaccattctgtgtttgcaccagaatcgtattcaaatccacgttctattaaatctccgccagaagtaaaatgactttcaaaatgccaccaatcaaaattaggatatactatataatgtttttcatattcataagtggttcttgaatcgtccttggttatcataacttcatggagtttttccccttctctaattccaatttcctttaatttaacatcatctagcattgcttttgctaaatcagttattttgaacgatggtattttagatatatacgtttctcctccttttgattcctttaatgccttaaatactaaatctacaccttgatctaaagtaatccagaacctagtcatttcaaaatctgtaattggaagttctcttttcccagattttatcaattcctcaaagaaagggattacagaccctctgcttcctgctacatttccatatctaacaactgaaaatatcgttccttcttcccccgaataagcatttcctgatataaacagcttatccgaaacaagttttgttcctccatacaaattaattggattaactgctttatctgtagaaagtgctactactttttttactttacaatcaattgctgcatctactatattttgcgctccatttatatttgtttttatggcttcaaaaggattatactcacatgctggtacttgcttcatagctgctgcgtgtataacataatctattccattaaacgctctataaagcctatccttatctctaacatctcctataaaaaatctgagtttattaaccttatcagggtactttaacgaaaattcttttttcattaaatcttgtttaaattcatccctagaataaattactatttttttgggatcaaattcacttaaaattctttctgtaaacttttttccaaaagacccagttccccctgttattaaaatggacttatctctaagcataatagcacctctttactatatttaaattttccataattagatttctaattttctatgctaacttttatcttatcgtgtattctatctaatataggaataatttcataattgaatatatcactaactaaaatgtaatcttcattttccaatgcttctataatagtttctaaatgttcgtttatattgtctaattctatatctcgtttttgcacatctttagtcaaattaataactttaataatccaatctatcccatccgatatttgcggtatgagtaatattgcttcctgttctttttcttcttgcattaattgaaccaattttaaaactccactttttaaactatataaatattcatttgctgtttgtaatgcttctatcttttcgttaatcattaaatactctcctctctcttccaaaactaaactaagtatcttttaattttaataacgtttcatttatatatgttaatgcatattttaattcttctataaattccccatataattgtctattttgctttactatttttttcatttcatcattattaggcttattattatattctttttcagttaatactttgtatgtaattggatataataaactttcaataagttcaatatcagaatatttctcttttatctctccatcaatttcatctagcctagctaaaatagcgcttactttattagtattcttcattatatatgagatttccaagtcatctagatatctcaatgtctttttacttttccttatgataaagtttgcagctttttcagcctcctctaaagcctttatcgcattttgtctcatttttattggatattcaattgtctccataggttctatcttttctgccttatatttctttatcacctcacttattggcatttcaattgtcccttttattctagctccaccttctgtagcgttaataaatttaatatctttataatattttatcatatattcaaaactaattctaaactgatctagtcctaagctcgttctaactttaccaccattaacatcttcaacccaaatatcattttcacttttaacttcctcgaatttttctgttctattattactttctgagattgatgaatattttctttcatttgtatatgctaaatcctgaccgataaaaataattggattgcaacccatatatattgcacatgcagtcattgaatgagatactgatcccccaaccgaaaaagagactaaagttttctccgctatcttgtctataaaattattatttgaaaaaaatattttatctcctctatgcttttctacaactttctcatttgtgccttcataaaataataatggtacattcagatcctctatataacctttgactaactcatagctaatttctcctggatctgcaactgtcaataaatgtggagtaatttgcttatctataagtgatcttagtgttctccctccacttattattaacatttcattatttatattttttaattcatctatatttcgttcaagcgaaggacctgctgacactattattgcaggtttatctttatatttattttcataaacatcaatcggagtcccttcaaccatgtatggaatatttttaatcaatgtttcaaaccatcttttgctgaagactatttttgtatttatattaatatttaatcccacaaaataatcttttatttcttttaaaaaatttcttaattcattcacatatatattattataatttgaaaaagtaacaacttgtgtactacttaaattgaactcatgtatatatttttctatgttatctaccaaatcatctttttcacagcatagtactcgtatgtttttatctttttttatccaacttatatcattaatataatttcttaaacttatattaggttcaaatactaaaattctatttttgacaaacttactcctcaatgcttttatatgctctccagctccgaatccgtaaatcaaaaaaacccttttttcatcattttcttccccaacttcgtccaaaaatttatctatttcgagcttcatattgtatttgcttccaatataaatccatttatcatttttacttactcttagtatctcgtagtcatctttagttttttcaatattaaacttcaaatcagtagtaatcataaattcacctctatttacttatcgatcttttataatttatctttaatatagatacactactattaaaaataaaaaaatccctcggcgggtactatgaattttgtgaattttaaaacggataaggtccatactcatcaatccaatatgagccttcttctgttttcgtttctcccgaataataaaaatctgcattacaattagggcactccattactggcattccctttcttttacattcttgttctaaactgtgttctccatcacaatattaatccatatcagcaaactcatctacgatgtccgctggagcgaattcactgtaattacatttataacaatgatatttgtaaaacttttctatgtactttatctcttttgggttcatataatatatcctttctgttactcgtttcccttatatcatatatcaccccatattccttatgccatattttccataaaaatttttcagttccacatttactgcataataatcgatttctttcaaaactctctattattctttgtttccatgatttcttaatttcattttgtctattcttttcttttaataattcatcaatatttctttgtttcacaaaattataaagatgaacaatatgttttgctagtttattgtttattcttgaataaacaccatattttcgcaccatcttaaatcctttaggtgttatgtattgtgttatttttcctataaattctaaaacattacactcaataactttttcaagaccatcattatgatcttcatacccaaatttcactatattattttcatatttaagaatcctatactctgctatcgtagctcgggcaaggtatctaactatatattttacagcttgtcttgtatcgtccaattttcttttaggattgacatagaaaccttttcgatattctttgtacagataaattattaattgtctagtcttataagattgaagtgcttttttattatttctaataaaactttttaccatgatttttttaatatgtgcattgaatatactcaacttgtttccactactttgtttttttgtcaactgcaccttcagttaccaaagcatgtacatgtggatttcattttaaatctccaccaaaagtataaattactgcaattgctccaacttcatagctagagcctttcttcttattgtaccaatatttaattacctcatttactccatcttgtaattcctttaataattctctcttagagtaaaaatattttctaagttccttcggtgacgtaactacactgtaccgatgtacaactcttagcatggtttgtctttgtttttcagcccatttcattgtatataatctaccacatatattgcaaaatttacttttacatgtaaatagaacttttgtactctccccgcatgtttcacacttatattctgcaaatccatactcaatatcactacactttaaagccttacttaccgctgcatcaatatactttcgcatatctttcggcaccttattccaatatttatttttaaaatcgttatagttatcttttaatatatcttttactgttattttctctttcatcataatatttatattttattagtttataaatgataagataataatgtaaggaaatgatcatataagaatgtacaaattagtttgaataaattataatcactcaagatttattgggggtaattatgattataaaaactaatatttattcagaaattaaaattaatagtttagaagatcttcataaactaaagccaattatggaggtaaacaatttgaaggtaaataaaagccaaatagctagagaacttggagttgatcctcgaaccgtaggtaaatatttaaatggatatgtcaaacctaccactagaaactgcaaatctaaaatagaagcctttgagcctattataaaagagcttcttagtaaagattcaattcaagtattttattataagcgcattttatggcaatatcttaaagataatcacggactagattgcgcgcaatcttcgtttagaagatacatttctaatcactcagaatttaatgagtactttaataataggaagaaagggcatatatccactacttcgcctatgaggtatgaaactgagaaaggaaaacaagcacaattggattggaaggaaaacatagaatttgttttaactacaggtgaagttattaatataaatgtttttgtgataatcctttcatactcaaggtttagagtatataaattatctcttgacaaaacacaagacgtattactttcttttttagatgaatcatttgaaacattcggaggagtgccagaagaattactaacagataacatgaaaacagttatggatgaagctagaaccaattattctaagggaaaagtaaataacaaatttcagcaatttgcaaatgactatggatttaaagtccgtccctgcatagcaggaagaccgaatacaaaagctaaagttgaagctcctatgaaactattagatgaaataagagcatataatggaaccttagattatgaaggtctgcataagctcgtttcagatttaaacaatagaattaatagtacatgccatacatcaactggcaaaatacctatattgcatttagaaaaagaaaaagatttcttatctggactgcctaaagagcagataagaaatcactacaaaataatcaccacaaatgttaaagtaaatcgccaaagcatgatttcatataaatcaaaccaatattctgtaccaccagaatatataggcaaaaaactaaaacttcaagtttatgatgatcaactacatatgtattatagcacaaatttagttactattcataaaatacaaaatcagaagttaaattatcatgctgatcattatgctgaaatcagtgctttaacatttaataaaaattcatatgaaatgatagagatagctagaaataatttaaaaatgataggagaaatatatcaaaatgaatagtacatatacacaacttataaataatttagaatatttgaggatgaagcaaatgattactcatttggacgaagttattgattttacaacaaagaataatttatcttttgttgatgctcttattaagcttacagctcatgaaattgactataaagaagcaaacatgattaaatctatggttaaggttggggcatttccacatcagaaagaaattaaggaatttgactttaattttcaacctggaattaataaagatcaaatattagattttttaacactacgctttttagaatcacaagaaaatattgtatttttaggttctagtggagttggtaaaacacatcttgcaacttctatcggaatcgcggctgcgaagcgccgttacagtacttatttcattaagtgcaatgatttgctgcaacagctaaagcgagcaaatctagaaaatagattagatgctaggcttaagcactttagtaaatataaacttcttattattgatgaattaggttatttacctatagataaagaggattcaaaactattcttccaattaatcgacatgagatatgagaaaaaaagtaccatcttaactaccaacataaattttaattcttgggatgatattttttatgatgctgttatagctagcgctatattagatagagttttacatcacgctcatgttgttacaattaatggtaagtcctatagattgaaagatcattttaagcaagaagaagattaaaaaactacattcttaaatgatcaaaaagttacatttctagcttgacatttataattagttatccacagattgtccaactatataatttcttaaagaaaagtcaggaccacccgtcaaacgggtggcttgctctgcggctgtaaacctaaaaaatatatagaagcgtttttctaactaaaactgtccatatactttttaattgtttggttattcaatattttagatgagtttatgaaacttaagttttataacaacttatagttttgcattaccagtatcagtttagcagttacacaaatcttgtgataaaaccattgttttagaatactcatagttttttaacggtatagccaaacgtccaccacccacttaacatgtggttttctgaactctaaagcataaaataaaaagctgtcgactttgtcgacagcttgagagatattttaaattaaatatctcctttttgtttaaattattgtaataattttaatacgttatttggtgtttggttagcttgagctaacattgattgtgcagcttgagttaatacattatccttagtgtattccatcatttctttagccatatcagtgtctctaattcttgattctgctgcttgtaagttttctgatgtattatcagtagaagtaatagtatgttctaatctgttttgaacagctcctaatgtagctctatgtttagaaacttcagtaatagctgattctatcttagctaatgctgccttagcatttgttgctgtatctaatttaagagagtttacagctaatttagtagctgtcattgtttgcataactattttaatttcttgacctgatttgtttccaacttggaaagcaactgaattacttgtatttaatatgtttttaccgttaaattcagtttgagtagcaattcttgaaacttctgaagttaattgatcaacttctttttgaattaagtctctatctgaattttggttagttccattagctgattgagtagctaatgttttaagtctttgtaacattgagtgtgtttcagttaacgcaccttctgcagtttgtactaatgaaataccatcttgagcattagttgaaccttgatttaatcctctgatttgtgatctcatcttttctgagattgcaagacctgctgcatcatctccagctctgttaattctttgaccagaacttaatttttcaactgcctttgaagaagcatttgtgttgattcccatttgtctgtgtgcattcatagcactaagattgtgattgattaccataataaattcctccttgatttttgaaattagacatccatgtcataatttaaattttatttatatcaactcttaagagttaatagcttatttgacttatatttatttattcgtaacttttcgaaattactttagacttattttttatttttttaaccttttgcactaaatatttttagatttccattaattccattgtatttctttcttgcctctctattttttcttataatatcaatttgtttttttacttcagctttttttttctttagtaatatctcaagctttttatctaactcaaatatacttataacttctttattttcatttatttcttccttataaaaatttattttcttaatttcatctagaattttagctctttgatctagtaattcgtttatatcattatcttcatttacttttgaaattagttgtaaagtcatttctttataattatcaagatattcatatagctccatatatttatccttcttcattcctgttattcaacagtattttttagttacttcctgcaaaatatgatgataaactattttgttgactttgtaattttgataatgcgctttctaaagttgcatatttgctatataacttattttctctatcagtcaaatcatcttccatttcacttatttggctcttcatacttgttatttgttttgctaaatcactattataagtattatatgaatctgtaccaactttcaacattaatgttgatgataatccagttacatttttatttaccacatcagcaagttttacaattattccagaattactcacatcagttgccgttgcattttttgtaaacaactctttaacagcttcaagattattttgaagagtttgagttaaagtattatcatcagcaatattatacaaaccatttttatcagtataatctttaactggctttatccccatactttctaatgttaatccagatgaagaaattaatgttgacccaaatattccttgcatagcgctttttaatccttctgctatggttgtaagactatcatcttttcttagcaaaccagtttttgcttttgtctcccattgtgtaatctgtgtatcagacatttctttcctttgatcatctgttaatggcatataatttttatctcgtgtttcatataattttgtatttatacttgataataaagtatcataatcgtttataaaagatgtaatcctatccttcaaagctgaaacgtctgtagttcctgttaatttaaccggagtccctccccctgttattttcccattagaatcttcatttgcatctgtagtatcagcaaaattaaaagtcacaccatcaatagtttttgtgttacttgttgttttattttctatatctgaaatattgtatacacttccatcagctttagttatagatgcatggagattttttcctgtggaagtctgactagatatacttgcacctccacttgtcaattttgctgtaaatgacaagtcactccccatattatttgattgtattaatataccaccagaaaaatcgctaattttagctgttgcagctattcccttagtggaaaaggcagtatttaattccgatacaatttgtgattgtgtcttacctgtcgttgtaatatcatctatagatgttgttgtcggtgtaccgcttgaatctttagtactaaatgaaaatgataatttgtcagctgctgttaaatttgttgatgtcaatgttgttgatgctttagatgccaattgtgacacacttatagaatagttatcaatgctagcacccgaagttgtggttgccgtcactacattactattacccgaagtaaacttcacagaattatatatctttgtagatagtaagctactcgaaccatcaacggttaaatatttgctataaaaatcgttagccgacttcattattgttctatattgctcttgtttccattctaaaacttgctcattctgcttttgtgtatctacttttaacttgtagggtttcattgacgctgtaactaaagagtctgtatctaacaatcctgaaagccccgtcattctattaactgatcttacatttgacatttatatcactccttttaaaatttgataagtttattttaatactcgtttttatccttgtttcttagcttctttatatgcatcatgccataaattacttacatcttctattagaggaataatttcatccataacttcaattttttttgtcatatttgcttcaactagtttttctttaataaaagcataaatactaagcaaagtacttgtccatcctgcttgtgttgtatcaagactaaccattaattctgtaaatatatcttgaactctaatcaaactagaattagctctctttatatccttatctaaaattgcttgtctggctatttttgcaaatttaaccgcaccttcaactaacataagtaataattgttcctttgatgcataatttacgctattatttttataaatattataagcattttgatacatatctagccctcctactttttagcatctaaaattcttcctttagaattttctccgtcaatattttcatttttttctgccttgacttctaattcttgttttttatacttcaccgtatctatagttatatactttttctcggtgtactctttagtttcattctttttatgtctttcattacgttcatcttttatgtttcttttagctgttatcgccttgcccgaatgtacttttttttcttttatttcctcttgcatcttttttcttatgtctgtatcaattttgtttaatttaaactccaattacttttcccccataagacttaagttttaaacacattatacaaactataacctaagctttcttatcaagtagcccaacttgtttgcacatatatgcaatcatatctaaaaacttttctgaaggaacctctagcactacatctttagtttcatcattaactatctttactattagtgttcctagatctttatggattgcaacttctgcatgagtcttatcgtcttctaaaaatttattcattttctttatagctttatctaattcttttttatcaacttgattttcattttgcttaatttcaatttcttctttttcaacttttctttcagctatagtcccactattattgtctataggtgagttattagaatattgagatacattattatatatatttatattatttccaattgcattaacatccatgtttggaattcctcctttattaaatcttagaattagtacaaagttatcttttcttgatattctttagcaaattcatatcaatttttattgcttgtttattttcttccattacctcttcatacaattctttccttaatattgatatgtttttaggagcatttatcccaattttcacactgccatcatcaattttacttatagtaatttctatatcatcacctatcatgagcgattcacctttttttcttgtaattattaacatctaatcactctcctattagaggctgctttattttatattttgaattatctaatattatttgttcccctaagttattagaaatatttataataattggtccttgaagattagttgtaattttctttgcttctgaatttaaagttatagttgtaataaccattacatcttttggcatttctatttttagattattaattatatcttcacttaatttcagttcataatcttcaaaaaagtcataaggtgatgttactataagtcctactccatcatcttctaatgaatgcagtagtttaaaaggttcatattcttctaactcaataagaataaatctttttaattcatcaaatcctaaaatccccttattaaagataattatgtttttttcgtcataagttatttccccatgaaccttagagataaatttcatgctataaacactcctctattttataaataatctaataacgttttagttaatacttttgcacttgtttgaagagatgctgtatatacagtttgcgcaactgaatattccattgttttttgtgtataatctacatccccaacttctgatagtatactagtcatattataattttgatcttcattggttgcttgcgctgaatccattctattttgcatggctccaacagttgatctacatttttgcacattctttattatgtaatccatctttgttaaatctgaccctgtaacagtacttaaattagtagctgtaggattacttaaattattcacaatatctttcaatacatctgaagcatttacacttgttcctgaatcagtatctgtaaactctaatatattcgttgatgtttgattatactcaattgtaacgcctgtagatatttctgccgttaatttcgtatttatttgagtatatgcatttggatctgctgcagttccactcgtgccagtaaacgctgttccatttttatctaagtaactaattgaaccatcactatttgcaactactggctttgatgtgctcttagttcctccaaaaatataattcccatcaaaagaagaatttaatatatctcctaattgtgcgaccttttgcactatttcatcttttatattactaatttcatcttttccatacgctccattcccagctttaaccataagctctcttattcttgaaaatacatttcctgcttcagataatgcagtatctgttgtatcaagccaatttgtaacatcttttatattggaattatattgcttattggcggcaatctcgctattcaattgcataattcttgttgccgtacttgggttatcagatgctctcgttattgaatttcctgaagagagttgattctgcaaagtgctcatatttcctaaatttcttttcatgttgttcaaataatttgcaacaagcatcgaattggttattcttggcatagtattcttcacctctttattttattaacttaattcttttatttctaagaaagttttataattactaaacaagtttaatgtatacatccttaaattaatctaacttctcaaattactttttcagaccatttattaccacatcaagcaactcatcaactgtacttattactttcgcatttgcttgataagcatgttgaaattgtattaaattagttgtttcttcatctattgaaacccctgattctgataatctatcattttcataagtttctagttgtttttctgaaatagaaagatcactggttactcctttagttactgtagcaagattactaattacacttttataataattatccaaagtcgctcctgatgaactgctatttaattttaatgcacttgcatctaatgttaactgtgaaccagtagttgccgtattagtaaagaaatcttttcttgttgaattactagtcacatcaattttatctaagtccatctttatttctttaatacttgcaattgctaaagctcttgttcctgctttatcaccgctaacatcagtagatgtctctccacaatttagtttagatggatctgtatttaacactgaattaacagttatgtttttagcattaatacctatatctgtagctgctcctgtaccattagaagcactagttacaaatataggatcattgtacttaaggtttgaatttgaacttgctgcatcagtacttcctgtttgaattgcattcactgcatatgctaatccggctgcgaatttgtctaattgatccatgcacgtttgaatgtctttttgtactgcttgttttcctccaatttctcctttttctactttaaataatgacttttctatactagctttatctgtaggagctggagtcacaataccgcttttatctgctattagaattctcttttcaagaacttcatttttcaacgcttcatctgccccagatattgttaatgtttttatattttttttatctcctaaaacagagtaagttaccgtaagattgcccgatgtatcaagagtcgcactttcaacataagaaaatctattacaattttttcctgtaaggtcatttccatcgactaacattcctattgtagggctagataattccgatgaacttacatccatcgcttcataattttctcttttagttgttattccaaatttagtacttaaatcatcaagtaaattatctcttttatccattaaatcattcggagtcatccctattgctgatacacctgctatttgttgatttaaatccttaatttgatccaatatactatttatatctgtaacatcagtctgcattgttccttgtgcatcactttttttagtgtcgagttgagtatatcgattatttagtgcacttgctaaagtttgcgcctgttgcaatgctaccgtcctgttacttgattttgttggatctaaagacaacgattgaaaacctttataaaaatcacttagcgcttgttgtatacccgtatctgaagtttcattcagtatatcttctacttgagttagataactattcttagtttcaagtttgccattatcagatttttgagttctaacttgataatctttaaatacatctctaattctttgtattgttgttatctctgctcctgttcctacttgacccgctgaacaactatcaaatcttgacgttccaccaaaaggtcttgtagtttgtaccactgccctttgtctcgaatatcctgtcgtgcttgcatttgatatattatgtgatgtcgtattaatatttccttgttgtacatttaacccccttttggcaatagtaaatgtatcaaataatcctgacattttatatcctacctttcataaatacaacttccttgtctttctatttcacgtccctatatattttgcttgaaaaatcactaaatcaattttcctactaaacttatagaaattttcttgattattatttcaacccccacaattaatcagctatctttattatctagataaatttccataagaattataagtctttatctccctgcttggattcataatatttaacattttatttgtgaacattatctgttgttttagtaaaatatcattagtatccttttgctgagttgtcttctccattgttattccgatgtccctgtaaacttctttaagttctttattatcagaactatttacgatttcaggcatgcttttcccaccaattaatttccttcgttcaacttctacctttgcaatcttcttaccacattcattaatctcatcaactaatccctctaaaccaaacacatctttactcataatcattttatactgagtttctagtaattctaggagttcctgcaaatcattatcttggtttcgtattaatgtaataagctcatttatcatttttattcacttctctccttcatagcatctagtagacttcttgctgttaatcttgcatcaacattgtatgttccactatctattttatttttaatatctgctattttttttgcattttgtatattgctatctaacgaataacctttaaggctttttccaagttctgaaatttcaattctatctacatcatcagttttctttgtcttttctatagctttactgctatttgagttatatgcatttatatatgtcgatctacttattctatcaatactcataatacatttctccatttcttaagcacatgaaagaaaataacatttgttattttttatcgtgcattactacttcattactatacttatcgtacttttcttttataagtttatagaaaagtcaataaaaaataattcacatctatattttcgcaaattgttcatggtatatgtttttattaatgaaaagaccactcagctataacagtttgtccttcttctaatgtaatttctccttcactaaaccaacaaatagcattatctttattcctttcatctgaaatatcatcgcaaacatcttcatcataaacttctataataccctcatttttcttttttcttactttacccctctttttactttcgctgtttttcacttctaaaattactggaaaattattatgttgattactaatctccatctttgctccgattacgtcaatatttttatcacttttattttcattatttaaattttgattatctaactttgagaatgttatttcattattcttacttttttcagaatcaacctcttctttttcttgtaggggtatcgcattttgagaattcgcttctatactttcatttttattcatatccattttttctagagtttttatcttattttcttctttgaaaacctcagatttttctcttactttaatgttttgatgctttacaaaatttttcactttatataccttatcatctgtaatttcaatcatttctaaatctattagtacatctaacgcagctttcatttcatcactatctctattaaattctattgctaaagtctctactgtgtatggtatatttcttgacatatatagttcaccttctctatttacctttccagctaatataactatcctattccatacatagtgaacaagatctctcttagacatcctatctattatttttaattttgtatcttcatacatatcaactctaaatctcacatatcttctctctttcatactcatcatttcccttcatatttatataccaacaagttaattcacaaaaatgttcttatatgcggcatagctgcctttttttaatgtgcatatcttatctatttaatataaactaacttcttttaaccaatcttaaatttttatccttatatattagaaatattcttgaataacaaatttataaagggttttgataaaatttttccaaaaaataaaaacccccaaaagggagcttttattttaatctctttattctttcaacactacttactatattagttattcttattccaaagttttcatcaacaacaacaacttcacctaatgctatttgttttccattaactaatatttcaactggttcttctgcaagcttgtctagctctattaaagaacctgttcctaaattcaaaatatcttgtatacttttctttgttcttcctagaactacagatatgtctaaaggaacatctaatattaagtcaatattctttattggtggaacgctgttttgtggcatcaatggttcaaatgttgccgcatgaacttccactggttgctgtattcttggctgttcatattgtggttgttggtattgttgctgatattgagattcttgttgatactgttgctgaacttgatctggctgttcatatatttctttatttacaattgcgtcttttttattatcctttgctggctcagacgctgctacttcttttcctttatcctctccagtcattattgcaacaatatttttagctgtctctattgggaatatttgcataatattgctatctacaatatctccaatagtcattctgaatgatactctaactattggctgatcttcaggaattgcttccgaaataggtatagaaccatctaccacaactttggctgttggtggtgatatatcaacttttcttccaaacatggttgccattgatgtagctgctgaacctatcatttgattcatagcctctgaaactgcactaatctctatttcagatagatcatgcgtttcacctacttttccatctccacccatcattaagtttgatataactaaaccatctaatgtttttataattaaaatatttcttcctattattcctgcaacatattcaatatctagaacaatgttcggtgtttcaaaaccttcttttatttctctaagcgtagttacgctaactactggagtagttatgttaacttgttggtttataagttggtatagtgctgtcgaagctgatcccatggatatatttccaatttctccaagcagatccttatcaatatcagttataaccccttcatccgatttactactttcagttgacgtatttgcaccttcactagaagataaatcttcgcctgctaataacgcatttatttcttcttgcgataaaaaactattgctcatacccattcacttccttatccgttatatctaaaatcataacacctgcattttttcctaccacacccggtttagcataataacattcttcattacctacatacacttttattggtgatgaactcttattgtcaagtttaattacatcacctactgttaattttaagaaatcatctactgttatattagcagttccaagctctgctacaatctcaacatcaaccttattgattcctttttctaatttttctcttgattcagccatcgaagcttcattatcattcttaaatgcatattgtactactaatttatctaatattttctctacactcaaataaggaagacacatattaataaatgtgcttctcttattcatttctacagaaaatgttattaatgccacaggatcattaggggatagggtttgattgattgccggattagtttcaattgtttctacttctggctcaacttctaacacagaatcccatgctagcttcaaattacttatcattccagtagttacttgtcgcattatgttcttgtctatatctgtaaattcttttgcctgagcttttctatctccctttcctccaagtaaaacatctatcacttgaagggaaaattgaggattagtctcaaatattattgtccctgataatggagccattttaaatatagtgataatggtagggttttgcacagaatgaataaattcctcatacgttatctgctctacagtttctatcttcaccttaacattttgcctagtctgacctgttaagtagttggaaattattcttgcataattatcatgaattaattcaagtgtccttatatgttcttttgaaaacttttgaggactcctaaaatcataaagtttaactttatgtttttcttcatctttaccaacatcttccgatcctaattcacctgtagataaggcagacaataaggcatctatttcattttgtgataagacatctgccatacttttccctcatttcaataatctaatttaataatttgtcgatatctattattgtaagaagcttttcatcataatttagtattcctttaatatattgttgcgctttacctgcatctttttctattttttgtatatttttttcatctatgtctaaaacttcttcaacctcatccaccgttattcctatttcctcatctcccactgtcaaaataattatattattttgttctttcccgggagttacattaagcaataaatttatatcaacaagagatttaatgcttccacgtaaatttatcaaacctttaatataacttggagccttaggaacctttgtaattcccatagtatcattgatactttggactctatctgtttccactgcaaaatgttcttctcctagtttgaatactactatttgcactcatattcctcctctacaataatatgcaatcaaccatcaataattgacacttaaattaaaaattctttaaaatttgcaaatatttattatacgctgttaaaatccatttcttatattattgcttttatattaacccacaactttctttatagcttctaaaactctatccgcttggaatggttttactataaagtcttttgctccagctcttattgcatccataaccattgattgttgccccatagctgaacacataattactttagcatctgggtcgaattcttttatttgtttaacagcttcaattccatccatatctggcatagttatatccattgttactacatctggtttttctttcttataaagatccactgcaactattccgttatttgcttcacctactatttcaaaatcatttttttctaaaatatcctttatcatcattctcataaacgctgcatcatccacaattaaaactctagccatacaattttacctccaaaatttaatttattcctatagatttcaatattttctctaacgaacccggcatagggatataataaaaatgtcctcctatattctcttctgtatcactgtctaagaatacagtttcaatatctagtatatattcatcatattgattggactcaataaatgtagttgtgagtattgcacctaacatatcaaatgaagttgcaggcactgatggtgccataacaagattagttaactgtgcaatagcattcatatatgatgctgatattatatttgctatctcgcataatacagaacttcccatttcactttctggagactgcttgcttccaactaatttttttattacattttcagctgtttcctgttcgaatactaaaagcatatttcctgaaatatcgcccagcactcttacaactgttccagctacagcacattctccactttcttgaaatacttcttctagttttactacatttactgctggtactgtcatatctactttttttcccatcatcatagaaagagcagttgctgcattacctgcacctatgttagaaacttctttaagtgcatctaattgcaaagtgcttaaattagaatactccacttataaccctcctttaaaatttttcaccctaaagggccaatcatctcacatttatatattattattgcttttataacataccaataataatatatcttgtccactccaaacctttagccttttgctcatttttatggaattataagtcaaactaattttaattagttttaaaaaccttacttaaaaatttcactttataataatgcccctacatctagtatcagcgttactaaaccattaccaagtatagtcgcaccaatatactgatctaaattctttaatgtttttccgagtggctttataactatttcttgttgtccaagtaatgaatcgactaataaacctatagttttatcacctacattaactattataacaaatttcttatcagtattactagcctctatatctaaagtttcatttaatcttactaatggaattacattttctctataaataataacttcttttccattactcttctttatattttcctctttatagtcaattactctatcaataaatcctaatgatattgctaatgtttcctctcctacttttacaagtaaagcttgtattatttgtaatgtaagtggaagcttaattacaaaagttgagcctttgccttcttcacttagtagatctacagtaccaccgagtgctgcaatttttgtcttaacaacatccattccaactcctcttcctgagatatctgttacaacttcattagtgctaaatccttgagcaaaaatcaaattcttaatatcactatctgacaatccttctgtgtttattcctttttgctctgccttagcttttactctttcaagatttattcctgctccatcatctgatacttttattaatgcttttgttccttcttggtatgcaataagcttcacagttccaactggaggcttgccttgtgcaattctcttttcagcagattctatcccatgatccgctgcatttcttaataaatgtattaatggttcacctatttcatcaataacagttctatcaagttcagtatcagcaccttctataacaaagttaatttccttatttaactctactgatatatcccttatcattcttgggaatctattgaatactgtatctagcggaagcattctaatcttcatgactaaatcttgaagatcagatgttgtccttcctacttgttccaatgtttcatttaactcttgagatttatgaacatttacgatttgttctaatcgagttctataaattacaagctcagaaaccatattcattaaattatctattctctctaaatcaactcttactgattgatgtgccttcttaacttctttcttttgagtaggctttttagcaactggttgctttgtctcaacttttgcttcagccggcttttctcctgaagctttttctatagctggtacctgtggcacttcttttacttctgcttcttttggagctatatctgggctttctaattctattaaagaagcttcaacttttgcaacttctgaaattccatttacaacagttaatatttcatctacagtatttttagttactaatacaaatttcaactcaaaatcaaactcttcattttcaatttcttgagttgatgggtctgattttagtatttctccgtgatcttcaagatctttaactattaaaaaggctcttgctgattttaacaaagtattttcacttaatgttacttttaattcaatagagttaaaacctttttctctagcttgtctaataacagacgtgtcatattgatttaaatctaaatcaaattcatcacctgatatcatttttcttccttcttctgacttgatttcactatcttgtgtttcttcttgtgtgttactattgtttccattttcttttatatcagctaaggctttcattattccatctatatctattttttcctcagaaccttcttgaacgttatcaaccatcttttctaatgtatcaaggcaatcaaataatactgttactacatcctgagttacttttagttttccttctctaaattcagctaatacatcttccatcttatgggtaagttctgctaaatcagtaaatcccatagtcgctgccatccccttaattgtgtgggcaactctaaatatttcattaaccttatctgtatcatctggattttgctctaaatctaataatgattcgttcaatgtttgtaaattttccaatgactcctctaaaaacattgacatatattgagatgtatccatccttactcctcctctatatctttttataaataaaggttgatgctttttcaaatccatagtctctgtaattataaatgctctctgtagctcctacaaataaaagccccccccttttttaatgaattactaaattttttataaatttcttgtttaacatcattattaaaataaataactacatttctgcaaacaatcaaatcaaagccagtatcatatctatctaaaattaaatcatgctttttaaatgttaccatattcttaattttagactctacataatacttatcgtcccttactttaaaatatttacttaaatctgcattatttatacctttcatttcattttcagtgtattctccactctttgctctagaaagtatagtatcatctatatctgtagctattatattatgtcttccatttggagctaacttatccaatattattcctaatgaatatggctcacagcctattgaacaagctgcactccaaattttcagacttgaattatttggtagtaactcctttgcaatttgtttttctaaatcagtaaataattctggatttctaaaaaattctgttacgtttattgttataaaatctaaaaacttttgtctttgctctggattactttttatagacttggaatattcatctaatgtttttataccaactcttgtcattaagctgtttattcttctatttagctgttctggcttatatgctgataaatttatacccaactctttatgaacccatttgtgaaattcattaaaatccatatttcctcctataactgtttaattatttttactatattttcagctatttcattaagcggagccactaaatctacttttccagtttcaaacgcagcctttggcataccataaattgtacatgtagatttatcttctgaaattgttataccaccattatcttttatgtttgcagttccatcagcaccatctctgcccattcctgtaagaattacagatattaaatttcctctataaacttttacagcagaattaaataacttgtcaactgccggtcttactccccatataggtggctcttcatttaaatgaatcaaattatttgagcccacagtcatatgctgaccgcccttagcaatatatatggtatcattactgattttcataccttctgctgcttcaatcactttcatcttgcaagctttatctaatctttcagaaaatacttttgtaaagccttctggcatgtgctgaaccacaaaaactggtacacctaaattttctggtaattttgttaatacctcctgaagagccttaggacctccagtagatgccccaattacaactgcatctatttttttatttttaggtatactgttcaccctatgtatagttttttcttttattatatttggattatttaaaccattctcactgtttgttattttattatttttattaggttctaaacttgttaacttctttctagaattaacgttgctagttatactttttatttgttctattaagttatttttaacttttgctatatctagcgaaatacttcctgatggcttagttataaagctaatagcaccattatctaaacattctaaagttagttctgatccttctgtcgttgaactactaagcattattacaggataattttttccaagtctttttaattctttaagagtcgcaagtccgtctaaatccctcatatgtacatctaatgtgataaggtccggattgtacttttctaccttctcaaccaattctcttccatctctaaatttagctacaacttcaaaattactttctgattctatcatatctgatatagcctttctcataaaagctgaatcatcaacaacaataatctttatcttacccacctaatcacacctctctttttattctacaattctacaattccatgccctacaactttaagtattacttttccatcgctagcgtaaaggatcatagttctacctttatttccacctatctcttcagcaattataggaattgactcttcttttaaccttttcttcactgcatcactattcctttttccaatatcacttattatgctcttatcagaaaaattaaacatcgaagctcctccagctattttagccacgagatttctctttttacacccttgcttttccattttatcaattaatattggaatagctaaatctgcaaatttcatggggtttgcactacttttaaattgtgtactatcaggaagcattatgtgtgctaaccctgccaccttacttatcttatcatataaggcaattcctatacatgaccctagtcctattgtcattattattcctggatctagcactaaatttagatcagctatccctacttttacttctgcacttatcatctttaccccctaaaagattttttcttcatcctctgaagacaatatcttttctaagtctaataaaataactatcttatcttctaattttattaaaccagctatatatcttttatctattgtcgctgttataggaggtgcttcttccattaaatcactattaacatctcgcacttcgtaaacattttctacaataattccaaacttgttttcatctctttttacaactattattttcctattttcattttctttgtcttctccgaaattaaatttttttgataagctaattattggaagtatactttgctcataatttattactccctttacaaaatcaggggaatcaggaagaatcgttggttcttcgtatcctaaaattctctcaacttcttttatatctgttgcgtaatgttctccatttaatccaaatattaaaattttcacttcattacttgacattactttgaaccctcctatagtataaatttatcaatcgttatttctccagttttatctatatatgcctctacatttttagaagaaacttctaacataatttgtttttctccaaagcagaaaatagtattgttataagctatgtcagctgtgatccttccctttttagagacttttaaaacagtactgactccagctacacttcccactgtctttaactttatttcagatccagctgaaagtgtaccacctctgcaaacagatttttcactagtaaactctatattttccaatgctattatattgcatgtatattgtcccttgcctgttataaaaacacttcctgatgcttctatggtagatccttgagcatatgctaaatggatatttgtaggaattaccattaaatcttctatttcacaaatttcttcctctaacaattccttaaaaatgtcaaattcattaatatcatttattttaagcggacctattcctaataatttatttattataaatgtagtaacatcactatgttgaattccttctgacatattataattcaaaatacttctacatgttttaggtaacgatttaaacttattctctattaatattttaactatttctccgtctttctttgaacctagtaagttatgctcttttacttgcttcgttgaatcaactaaatcacgaataatagaaaacaatcctctcaaactttccaaatactgctttttcccaacattttcacgtccagcagtaactgttgaatttaatatatttccacctataaaaatctctcctgaagatctgagtattgcagattctacattcttaccgacatgaagttcatttcccgccttaacttccatggcttccaaaacatttccaacaacttcaacattcccaacaaaatctatatttccactttctaaatcaacttgatctaccttatacaatttgtttactataaatgtatttcctttataagttggcttaccttcagacgttgctataataccattattttcaagtttacatccttctccaatccttactcctgcttttttaaaagtttttcttttaacaggaacaccatagatatcttgtccatcatttcctaagctaccaggtattattcttcctatagaatctccaattttaacatttgcaattgaaaatctatttctataatcaactctttcttctgaatccttgtaatgaattaactcttctgaatccttaaataaaacctggatttcatctggaatatcgtctacggctgctactcctttagcaactaattttttttctacattatattcattacatatagattcaagttctttttcaataattccatatttaatacccttactatatagtagctctttcaattcttttgctgtatattttggtggatatttattatcaatattcttctttttcattatcaaatttttttgatattcttgatctattaattcatatatatgagccggagttgattttatatcaacatatgcctccattttatcatctgtaattgatatatttatgcttcttattggctcagactcttcaaatttatattcaattttatcttgtgatgttacaggagttataccatcacatttctgtccattaataattaaaattacacccggacaagtttttatagtaataatttcatctttattcttagattccgttattattatctttccactctcaatcttagctccaaattcctctttagtttctggaaattcttcaattatttccttctcttcaatgcttactttattttcgtcaacttctattatttctatttctactcttcttctaaaaaacttcttttcttccttaattactttatattttaaagcttctttcaaaatatttaattcagaagatgctttttcaagacattcatttaaggatgttccagaaaacttcaagtccataaatatctccccctaaaaatactcctttatctaagtataccacagccatttttaattttatatccattatttatattaatctatattattttacatgaaaatacaaattaacttaattttaatgattatttatatacttttctatctcattatcatattctttcattaattttctaatcaagctattatctacattaaaacttatgctgttcactgtttttattggtaatattttaggagatgtgcccgaaataaacattccatctaatttattaatatcagaatatttatattctacttcctcgacttcaaccccaatcttatttgcaatatctattatttcccctctagttactcccggtaatacagcttttacaggtgatgtaagaagtttatttcctttaaccatgaaaatatttgatctgctaccttctgttatatgaccgcttgaattgactaaaatagcctcatatgcattattgtcctttatctctttattaaccctttctctaaagatataatttattatttttgcattaggattttctctttctccaaaataaagtatagtattaacaccattcatatacatttcatcagatggatatgagtgttcaataaaaaacacccttagctttttttcatttactccaaatgttatttttatatttccttcagatttattttcactttctattagatcatcaatctccttacttatttcttcgtaacttactgaaaattcttcattacttaaatcaaaagaatttttcattctttttaaatgattttctagaaaaattggctttctatttattactcttaaaacttcataaattattttatcttccatgcctctccattcctttctactatatacagatattgcaattcacaatgcacatttcacaattcacaatcattactaaaattcctgcaatatttttagaatcatgataaagaatcatttttgcaatgtatatatactctgtgatattagattaatattattaattgcataagcctaaactttaatcatatactgatgtaaattctttaacacagcttatactatgtaatcaaatcaatttcattccttaataagactgacatcttaatttatattttatttccatcttagtatctctatatcatggttctttttatagtttattaaatatggcttacctactagatccaataatggtttatctgataaggaatcagaaaacatatacgattccttaaagtccacctcaattttttcatctttaagtatttcgttcaatcttctaaccttctcttctcccttgcagttattgcctaccatttttcttacgaaagttccattttcaaatccaaatttagttcctattactttatcaacttcttttatattataaaattcattaacgtaaaattcaggagatgctgaaattaagtatatatcatacccctcatttttaagttttttcatcattttcaatgcatcatcatataaaatattttttagcctttcatcataaaactctttaacaagttctgctagctcctcttctttaataccatctataaaccttaaaaatgtctcttttacttttctctcatcatatattccgattgcatacataattccacagtatatagctcttggtaagaatctaagattttttttatcttttttaattgcatacttaaataattccattagagtctctttttttgtaatggtataatctatgtcaaatatagcaagtttcttcaaaacacaaatacctacctttttaatatttaattcttaacactcaaacatatcatttaactttactttaaattattaagtgtttagagctaaatattattaatgattaattttgattaaaaatccttgggctttttttaactcaatttagtattattttttatcactcttttattttaagtaataataactttaattattacaacaaaattgtaaatatatatgttgcaattcacaatgcacaattatagctaaaattttcgctatatttttagaattgtaacgaagaattattttcccaagatatatacaaaaattagaaatcaattctaaccataatattctttcttcatatttactataaataaacaactttaaaactaggtttatgtgataacttaccgaaatcataaactataactatacttagactatgaaatatattccaatcagaaataagaaatgattaatatacataagtatagattatagttgttttattctatagataacccaaccatacgcgtaaagcttaaccagtaatcaccaaattgtagggggaagagagtagctcattaattttccctctgtagtttggcgttttcttttttctcgcttacagctccttcctaaacttactagtatctcatatattatttccaagttttcctttttaggaatgaaattaaggcatatttctttaagtttacttcctatagttgaatatatcatgagcatacttatttctctattttcttctgttttatacttaaaatacaattcagaataaactgtatttattagtaaagttattatcaatctaccataaagcaaacaatttaagtaatcaattcctgctgatttgacatggtcaatctttccgtagcttttccagcatttaaataagagttctatttgccatcttaacctataaatatcaaggagcatgtccacatcggcttgttctttttcaatgtttgttatcataataacccagctcattagttccttgtcaattttctttggggctcttccttgagcttttgctttttctctagcccttcggattcgcaaattcacaatttcttcgggtaatctttttcctattactctaaattcttctctattattttgtttcattccaacatataaataagtatctataacaccgctcgatttctttaagaaatcaatcatttcaactttttcaaaattcccttttttataattttctttataaagtgcagtattatatttaattttactaagaaaaaaagcagatttcttttcaagcattttaaaacactttttatcgaaatatcctaaatcaactaatagaatttcattagtgttaattttgtccgccaaagttttcatatatgaattatcatttgttgtgccatcctcaaattcaaatgtttcaatctgcttacttttgaaactatatactgtttgtattttcatttcagatgccgacttatcttctgaaaaacctttataagaatctcttaacgagtcatttagcttgattaagctactatcgcagatttttatatcattaaaggctttaaatatttcaatgtgattgtgtttaatgctcttaattattttatcctcaataatatttgtaagaatagtttttaaaaagtttgaacctgccttgagcttattttctatagcttgcctagacactttcaaattagggtttatatcttcacagaaatttgctatatttcttaatgatggattttcaagactataaactccaaaagtaaatgctttaaaaaatgtaaatccatccaatttactatttctttgtgtaaatccagtagtcacggcggtttttgttattaatctttttgaaaaaagattaataattttcttaattttatccatactacttaatgaatttaaattaattttcattaaaagtcattcctttcttttttgtgtttattgttaggaatgactttttttattatttttataactgttaatatatgatttaactgttaaaatactcattagctttacgcgtatggataacccaactttaagttagatttatactatgaaatatatcccaactagaaataagaattatgcttttgtgaaatgtttcattaggaatttgatggctttgattcttagattaaaagttgttccaagtatgctagttcaaagcttgcctttgaggctagcatcttgggtgcaacttgtgagcttagaatcatccatcataatttccttagaaactggaacaacagcataattctcatttcggcgagttatatgcataagttcaggtcttagttggattatctatatacattatttaattttgcttaaaaatattgaaattctatctattccagtttctattatatccatagatgtcgcatatgataatcttatataatcatctagcccaaaaccagcacctggtattactgcaactttctcttcttctagtaatacctttgcaaaatctacagagttgttaatagtttgatccttaaatgtagtattcaagtacgaagatatattaaccattatataaaatgcaccattaggctttataattgatatttcatttaacttttctaatttatatatcatgaaatttcttctattctcaaattctttaatcatattgtttaaatcttctactggaccatttaatgcctctattgcagcatattgagctattgtattcacattagatgtcatgtgactttgaatgcttgtcataagcttagttatgctttcacttgcagctgcatatcctaacctccaccctgtcattgcatatgtcttagaaacgccgtttattactatggttctttcataggcatcctcatttaatgctgctatacttatatgcttttctccatcatatattagtttttcataaatttcatctgatataattattaaatcatgttcttttgcaaaattagcaatttctaacaattcatcttcgtgataaattgttcctgtaggattattagggctatttaataaaagcgctttagttttactagttaaagctttttctagatcagcaactgtatatttataattattttcttttaatgtttcaacaaacactggaactccatcagctaacttaactaattcaggataactaacccaatatggtacaggaattaatacttcatctcctggattcaaagttgccataaatacatttgcaagacattgttttgcacctgtagaaattattatttgacttggcttatattctaagttattatcatttttaaacttactgcatatagtagtttttaattctaacaaacctcctgctggagtatacttagttttcccgtcattcatagcttttatagctgcttgaattatgtttcctggtgtattaaagtctggttcccctgctccaaaacttactacatcaaccccttgactttttagttcattagctttagctgtgattgctaatgtaattgatggtgtgatattccccgcttttttagataattgcattgctttttccctccaattttgaccttaaaatgaattataaaaaatgttctaattcatttatatatacttttgtcgcataataaaaatatatcattaatatattgaattgtaaacaatatggaatatttaagggacatgaaggaaaataacaagtcaaaatgcaatgattatttttcattagacaatgaagcagattggtctcatagtaggcctattaggacaatctactgaagcagtataatggaaaatgggcacttatgaaaagagtagctatgctgcaataaggaacttttcttagcagattcacttgttatttttttgaatgtccctaagacatattaaacaaaagaccttagtaataaattactaaagtctttaacttcttattcttcgcctactaactcattttgataataagctgatactctatcaaattcttcttcatccggaacaacaagttcatcttcatcaagtctgaaaagataaactgaatcttcttctggattttgagctaaataatatgcttttccttcatattcaaattcgtcgattatagggcatgtaactacatttccattttcatcttctaaatctataacgaagttttcttcatcattgcatccacatccacattcatgatcttcatcatggtgatgtccaccgcatccacaacttccttcttcactattgcatccacatttttctaaatctttttccatgtttcaacctccttttggttcttaattaattttacccttaaatcataaaaattaaaacccttaaataaaaaaattgtaaagtaattttaataaatattctaattatatatgttctagaacattttattcatcaaaattcaattcaaattacaatttattagaaaataaacagttcttacaagaaaatataattttattatttcaaccattatattaagtttcttctaaaaattagatctcagatcactttggatttggatcttttaaggatctgatttttcgaatgcatgtaaaaaagaagccacttcctatagaataatttctacaaagaagtgactcctcttttcgcgcaaatttagttatttcaatattttaattactattgttgattagctaatttcttgtatccttctaatctttccatagcatctttcttagtcttttcaaataaagcatcagcttgttctgggaatgccttagctaatgaagagtatctaacttctcccattaagaattccttgaagtctgcagttggttcttttgaatctaatgagaatggattctttccagcatcttttaattctgggttgaatctgtacatttgccagtaaccacatgcagtagctctcttagcttcttcttggctgttacccataccaattcttaatccatgatttatacatggtgcataagctattattaatgatggtcctttataagcttcagcttctgcaatagctttcataacttggttcttatcagcacccatgttaatttgagctacatatacataaccataactcatagccatcattccaagatctttcttcttagtcttcttaccacttgcagcaaacttagcgattgcagcagttggagtagctttagatgattgaccaccagtgtttgagtaaacttctgtatctactactaatatattcacatcttctcctgaagctaatacatggtcaactccaccgtatccgatatcgtaagcccatccgtctcctccgaagatccattgtgatctcttaacgaagtagtctttttcagctaatatttctttagctaattcagtgttagatgcttctaaagcagctgttaatttatcagctctttctctagttccttcaccttcatttacgttatctaaccattcttgtaattcagcttttgctggatcatttgcagctatagcagcttcagctttttctgcaattctttctcttatagccttaactcctaagaacatacctaatccatattcagcattatcttcgaataatgagttagcccaagctggaccatgtccatttttattcttagtgtatggagttgaaggagctgatcctccccatattgatgtacatccagttgcattagcaaccatcattctatcaccaactaattgagttatagctttaacatatggagtttctccacaacctgcacaagctcctgagaactcaagcaatggttgctcaaattggctacctttaactgtcttcttgttcattgggttcttcttaactgatatatcatgagttaagtaatcccaagcttctatttgatcatgttgagattcttgtggtttcataactaatgcttttcctggtgctggacatacttgagcacaatttccacaacctgaacagtcaagtggtgttacacccattgtatagaataatggttcttctgtctttaatcctttagcagctacagccttatttgcacttggcgcagcattcttttctgcttcagttaataagaatggtcttatagaagcatgtggacataccattgaacattggttacattgaatacatttatctttatcccattcaggaacatttactgcaattcctctcttttcgaaagcagcagtaccattttcaaaagtaccatcttccatacctgcaaatgctgaaactggaagttgatctccttcttgtctgttcattggaataactatatctttaacaaacttagtagcatgtttaatttctactggagcttcatctgcaactgtcttccaagcttctggaatgtctattgcaacaattgattcaacacctttatcgatagcagcgttgttcatgttaacaactttttcacccttcttaccgtaagaagttacaactgaatcttttaagtgcttaatagcatcttcaactggaataatgttagctaacttgaagaaagctgattgcattatcatgttgattcttccaccaagaccgatttcttgagcaatacctacagcattgatagtgtagaacttaatgttgttgtttgctaagaatctcttatatgaagctggtaatttttcttctaaatcttctggagaccagatagtatttaataagaaagtagaacctggttttaaaccttcaagtacattgtatttgtggatgtatgattggttagaacatgaaacaaagtctgctttgtttattaagtatggtgacttaattgctttcttaccaaatcttaagtgagatactgtaattccacctgatttctttgaatcatagaagaagtacgcttgagcatacatgtctgtattatctccaatgatcttgattgcactcttgtttgctccaacagtaccatctgatcctaatccccagaacttacaagatgtagttccctctggagtagcatctatatcttcagttacttctaatgaagtatttgtaacgtcatcaacgattccgattgtgaatccgttcttaggagcatcttgtgctaagttagcataaactgcagcaatatgtcctggatttggatcttttgaacctaaaccaaatcttccaccaacaataagtggtgcattagcttgtccatagaatgcatttcttacatctaagtataatggttctccagttgatcctggttccttagttctatctaaaacagcaattttcttaactgtctttggaatagcagctaataatctttcatttgagaatggtctgaataatcttactttaataacaccaactttttgtccattagcatttaagtaatctatagtttcttcacaaacgtctgtagcagaacccatagctataattactctatcagcatctggtgctccatagtaatcgaaacagtgatattctctaccagttaacttagtgatttcagccatgtaattttcaactgtttctggtaattcattatagaatttattaacagattctctttcttggaaatagatatctgcattttgagcagttcctctagttacaggatgatttgggtttaatgctctttctctgaaagctttaactgaatcccaatcaagtaaacttgctaattcatcatattctaaaacttcaattttttgtacttcatgagaagttctgaatccatcaaagaagtttaagaatggaattcttgttttaatagcagttaaatgtgctactgctgctaaatccataacttcttgaactgatccttctgcaagcattgcaaaaccagtttgtcttgctgccataacatcttggtgatctccaaatatgtttaaagcagaagtagctaatgctctagctgatacgtggaatactcctggtaacatttcaccagaaattttgtacatgtttggtatcattaataataaaccttgtgaagctgtataagttgttgttaaagctccagcttgtaaagatccgtgaactgcaccagctgctccagcttctgattgcatttccataacttttacaggttgtccaaatatgttctttcttccttgtgctacccattcatctacatgttctgccattggtgatgatggtgtaattgggaatattgcagaaacttctgtaaatgcataagatatatgagctgctgcagtattaccgtccatagttttcatttttctcatcgcgttgacccctctttctaattttaaacataaattagtaatttaaatttattaataagttagtcttaaagaccacctaataaacatattaatatttagcttaagagatttttaacaatagacgcacgaaacaatatgacaaaccttatattaattaactagtttttttcctaattgtttaataatgtttgcctgcgttttagttggtgaatctttaattgttaaatctccaattacattaaaaccataagatgacatttcatctttccataatttcataaaagtatcttcaatccacccgtaagttgcaaataaaatacaatttttatttatgtttacatctttataattttgtaattgatctaaaaatggtttcatttcttcctgctcgattttagtggcatctactgctggacttccaaaagcaatagaatcagcttctaaaacatcttccaatgtggcatctgcaacgtgcttcacacttacttccgctccttgctccctagcaccatctgccatagtgttcgcaagtgcttctatatttcctccacaactccaataaatgattgaaacttttttcattgtaatgcacctcatcttcttgttaaataattaacttatgttttcactaaaatgaacttactcttttattatatctcacatatttttttttgcaagatttgattgtataatttgtgctttatttaaataataattacaaatttaataatttatttttttaccttaacacttcttaataatacgtttattattgcttcaacaccgcttttggcttgactcttttccatattattaattaattcatcttttcttttttttagctcaagaactttttcatataatacattatttttaatttcttcttcttgcagcattaatgaatacccttctttttcaaacgacttagcatttaatatttgatcccctctacttgccttttttgaaagtggtattaatagtgttggtttttttaatgctaaaaattcaaatatagaattagcacctgctcttgaaattatatagtcacaagccttcataaggtcaggcaattcttcggttacatattcaaattgcttatacccttttttatttaaaaaattattatctacattaccttttccgcaaatatgaattatattaaaatcttttaaaagcttatctagattttttcttatttcttcatttatgagcttagaacccagactcccccccataataaagagaatctccttattgtcagaaaattcacatatctttttccctctagtcttatctccgttaagtatttcctctctgattgggcttcctgtaagtactcctttatcatcctttataaactttagactttctctaaatgtgacacatagtttatcacaaaatggtgccgaaagtttatttgcaagccctggagtcatatctgattcatgcgcaaccactggtatttttttaatagatgctgctattacaactggaacagctacaaaaccaccctttgaaaaaatcacatctggtttttcttttgataatatttttagtgcttgagcaattccctttaaaattttgaatggatcagtaaaatttttcacatcaaaatatcttcgtaatttcccgcacgaaattccgaaaaaaggtatattgtttttagttattatttctttttcaatgccgtcaaaacttccgatatattttatctcaaagtccttttgctttagtttaggaactaaagccagattaggagtaacgtgaccagcagttcctcctcctgtcattattattttatacttagccaaaaactatcatcctttcttataataactcaaaatatatgatcttaaattcataacatctttttatgcttaaccgaaaactctattcttttacctataattttgtattactatttgtatagtagtattaccattatattcattaacatttggataaaatactaaatcaaggttcacatgattatattctccattatagagtttttgcaattcttcatttccatatttactgctaacttcttcttcaaacttttcaatatcaccaaaataaatggcatccagagctttattcatcctggtcttgagttttaattttagcacattcctattcttcccaagtattgttgcctttaataaattaatatttttctcagcaaacaatggtttagagtttgatttaccaaaaggctctaatctttctaaatcatttatcacatcatagtttatagcatcaagcggcaaaaccgagtctatagtaacttttctcaataaatcctcgtcttttaaaattgtattttcatttaatcttcgcctaaattcatctatattttcttcttttaatgaaaaacctgcagccatagggtgcccgccaaacttttcaagcagatccttacacttaataagttcttcaaacatattgtattcttctattgatcttcctgaacccttcacaccatgttctgcttttgttataaccaaagttggaacattatatttttcttttattcttcctgctattatacctgctaaactttcatgtatatcaggaatatagataacaaatactttatcatttatcattccacttttctctatgatttcaacagcagcctcgacgccattcatggtcatatcttttctatcttcatttaatttaactaattcttttgcgagccttactgcttcctcttcatcatctgagagcaataatttcaatcctcttttagccgaatctagccttcctgaagcatttatgcatggccctataataaatccaagatgatataccgataaagttttttctgttaattcgcattctcttattaattcttgtagtcctaagttagttgtactgttaataagttctaatccctttttaacaaatatcctattctcatcaactaaatctacaacatcgcaaactgtcgctattgccaaaaattctatgaatttgtagcattcttttttatctatattaaaagtctcataaagaatttctacaagcttaaatgctacacccgctccacacaattgtttaaatttataattgcattcactttgctttggatttactacagcatcagcacttaaacttataaattctctgacgttattttctttctcaacaaatggtatatcatgatgatctgtaactattacggtaattcctaattcttttgcgtattttatttggtctatagcggatataccattatcgcaagtcagtatggtatcaaccccatcttcttttgcctgctttataatattcatattaattccatatccatcttttattctatctggaatttcataatctacatttgcattgcacctttttaaagctgagtataaaatataaatacttattacaccatcaacatcgtaatctccaacaattcgtatcttattctgagcttttattttctcacgcagtatatcaaccgatttttctaaatctttcatttctctagcctcatgaaatttatcaaaatccgggttaatataacttcttatcatttcatcgcttataatattcctgtttactataagcctactaaccaattctgaaagtgcatattttttagatatgtatttataatcagcttttatattttttataaaccatctttctgccatttcttctcccctcacagcatgccgcaacaatacccctaagacctttgatcctagaggttatatactttagatttctatatttttcatttctcttatactgaaataaagtgaaaactttcccagtaaatttgataacttttaccctataaacatcttatataacataccagatgaaatactttctactttattcccatatccaagaatatctaacaacttatatgcaaatgccattgctgttgctggacctctgctggttactatattcttatcaactactacagcatcttctaaatattcacaatttggtaattcatcttcatatccaggataagaagttatatttcttccttctgtgattcccgctcttccaagaactattggtcctgcacaaatcgctccaattaattttccatctttgttttgctttttaacaaattttattactctctcatcatctcttaagttagtagctcctggaatacctcctggtattaccactaaatcatattccatcttctcatcaaaaagcttatctgcttgaactaccacgccatgacttgacttaacttgcttttctgcaattgatactaaatcacaagttacatccgcccttcttattatatcagatacagttaaagcctctatttcctcaaaaccttctgctaataaaacgcatactttcttcatatcaattcctccttaaatctaaacaatgaggatatcctaaactattttttagaacaccctcattctgcttctcttcaatttatacctacattataccccatttattgtttaactaccacaacttaattgtcagaattggaactttccaatctataattttctttactttcttccaaccacctgccatgaacgattcacacataatgatatattttgtgtgagacattcactttgctaaaaagtaagaatcagaaatttttattttatatacaacataacttgttatgtttagtaagttctgcagtgcgcactttttttatgggcaatatgttcttatttgtacttttcacttttttataattataagttcttggttgtgcttaataagttccgtattgtgcttctcactcttcttaggagtgcgcactttttttatagttataagttcttaattgtgcttcgcacttcttttatatgtgtacatcttttatttcatcatcaagtgaaaccatcattatacttgttcctcttccagccctattttgtaacttaatatcacttatatccattactgatctctccttgcctttagaaacaagtgtaatttttgtatcatccgaagataacattacggtattatcatcacttttcttgtaattactatgatactttccaaaaatgacttgatcttcatccctcagacttattccagttacccctgaagctattttacccataatatttacattttcaaccggaaatcttattgccattccttttttagttatcatgatcaagtgaccaatctttatttgattcatttctacagatacaacttcatcatcttcaaacttaaacttatagcatgcttgctttagaaagtcaccttcaaattcttttaacaatgttttcttaaccattccttttttcgtaaacgtgtatactcctaagtcttcatcataagaatcaatggaaatcagacttattatcttttctcccttttccattttacctataaatgcttctacatttatttctttattcaaaacatttctcattaaaaatactggtattttatatacatatcctctgttgctaaagataagcaattcttttaaagaatttgttttaacttttaatgagtcttcttttatcctctcatagaatttaaacttattcttatcagtaactccaacacttaattcaaaatattcaatttcattagtatcttctacttggctaatttcatcttcttctgagaaattaaatagctgagtaggtaaaatatttctagccgtttcctctagattttttatttcaagagtgaattctaaccctagtttactcttaacttttaggaacttctcttcttcttccaattctctcatggatacgtcaatcaactcatcaccatctctaagttttaacgcttgaagtttaccatatgcagtttggaatttatctaaagaacttaacttaattcctccatgttttgttataaatctaaatgccttgctaggattgaaattatctatggatatagctgcaattatcttctcattatcaagatttaaagatttaataatctcatccaatctatcccctttttctttccatctcatttcaggaatattaataccttttgtttgatacataaaacctttatctgtaaatacaagaagtgtatccttagtattcgaatttattaaatattttaaagaatctccttctctatactcaatatcttctggattagagctagatctagtgtaattttttaatggtattctctttacaaatccgtctttagatattgttaccataacttcttctacaataattaattcttcaacatcaattttactttcattatcatcatgtataatttcagttcttctatcatttccgtacttatcgcttatttcttttaattcacttttaacaactttcaaaagttctttttcactagataaaatcttctcaagtttttttataagtttctcaagttgcgcatattctttttcaaatatttctatttcaagacctgtcaacctatataacataagttccaatatagcttgtgcttgagcctcagaaaacccaaatttgcttatcaaattttccgatgcatcctttttagactttgaacttctaatggttgctataacttcatctaaaacacttatagctttaataaatccttcaacaatatgatgcctcttttttgccacatcaagttctttttgggttcttctagttattatttctttctggtgctctacataatatcttattatagcctttaaactcatagtttctggctttccatttgcaagggctaccatgttaaaacttatgttacattgtaaatcagtttttttaaacagatactttagcactttatctgcaacatcttcatctgcatttttctttaattcaattacagctcttattccacttctatcagattcatctctaatatctgttatagattccaatgcttttgcatgcctcttatcaccagtcatttcagatattgtttggagaatcctagacttatttcttctgtatgggaattctgttataattattccgattcttccattttctaatttttcaattgaagtctttgctctataagctacttttccttcaccagtttcatatgctgataaaatggatttttctcctatcaaaattccaccagtaggtaaatctggtccctttatatatttcataagttcagaagtagttatttcattattatcaatatatgccagtactccttctgttacctctcccaaattatgtggaggtatattggttgcaagccctacagctataccaaacgccccatttacaagtaaattaggatatctacttggtaatactttaggttccatttcactatcagaatagtttggaaccatttctaccgtatccttttcaatatctcttagcatttccattgcaataggagataatctagcctctgtatacctcatagctgcagccccatcaccatcgatagatccccagttcccgtgaccttcaattaacggtgccctagttgagaaatcttgagctagtattaccatagattcgtatacagatgaatcaccatgagggtgatacttacctaagatatctccaactattcttgcagatttataataaggtctatctggaaaggccttaagcatatatgaaccatataaaattcttctatgcacaggcttaagaccatctctaacatcaggaagtgctctatctttagcaacttctatagcatatggtaaataattctctggcattgcttcttctagaggaataccaattatattattatctttaggtataatattttcattcttttttgccatactcttctccttttttgatgcataatacacatttcacaattaatggtgaaccttcttcgaaatttctaaattttaatttcaagttctgcaggaacgtgtttattaattgtgtattgtaaaatgtgaattgattaaaattctccgtatttatacatatagttctttctaggttcaacaatatctcccataagtaacgaaaccatcttttctgcttttgccgcatcttctatagttacttgaagcagagttctactttctggatttagtgttgtatcccataattgatcgggattcatttctcctagtcctttatatctttgaatcagtgcaccttttccaacttgtttctttgtattttcaagttcgtcatcactatacgcatacttaactatagtttttcctttagtttccctatacactttatacaatgggggctgcgctaaatataaatgtccattagcaataagcggtctcatatatctataaatataagtcatccataatgtcctaatatgatatccatccacatcagcatcactcattattattatcttgtcatattttaaatcttcttctctataattatccaaagtacctgttccaacagcagtgttaaatatttttaattcttcagaagccaatacattttcaagtttttgtttttcagtattcattatcttaccctttgaaggcatgatagtttgaaatcttctatctctggcttgctttgcagatcctcctgccgaatctccttccacaactataaattcattcacagttttatctttcaatgtacacacagcaacttttcctgcaagcggtgctgtaccttttcctattttctttttttctgcttcatttattttcttaatcttgtctcttcttttagctgcttctaatgcgttattaattatacttgttgccaaagttttattatcttctatccattcagaaaatttagtatacactaaatcattcatcatagtatatgcttcattatttccaagtttagtcttagtttgaccttcaaagataggattcgtgattttaattcttacaatagcagtcataccttctcttaaatcatcgccttcaaattccttatctttttccttaaccaatcctaactttttagaccattctttaaaagatcttgtcattccagtcttaaatccagtttcatgagtccctgcttctgttgttggaatgttatttacataacttgcaatatattcagtagttgaatctgtaaattgaatacatacttcaccatataattgaagttccccaacagttctttcaccgtcaaaaattatgggctcttcatgaattggtgttttactttcatttagataatttatgaaatctaaaagaccattttctgagtaatattctttagtgatttcttgtccttttcttttatctattaattctaatcttatccctttattttggaatgccaattcctgtaatcggctatctattatatcaaatttaaaatcagtagttgagaagatttctttatccggcttaaatgtgatctttgttccaactttatctgtttttccaataaccttcaagctgccaacagatgttcctggcatttctctttttaattctttatcaaaagcatattcaaatctttgtctgtatatattcccgttttggtaaacttcaacctctaaccattctgataaagcatttactactgctgctccaactccatgaagtcctccagatgttttataatttttattatcaaactttcctcctgtatgaagttcagtaaataccatttcaactccagatttctttttgattggatgaattcctgtagggatacctcttccgttatccaatacggttacacttttatcttcatttaacgttatggttactttgttaccatatccgttagctatttcatctatggagttatctattatttcccatatacagtgatgtaaccccttactacctgtagatcctatatacatacccggtcttattcttacaggttctagcttttcaagtgatgttaaatctgttacatcataagcattagtattttttaattccataaaactcctccatctgaacaccagttcttattttttcgtaattatttcgctctataaaatatactgcctttctgctttaatgtcaaaaaaaacttaagcagacatctctaatctataattttatgatggtcgcttactctgtaagccctaagtaagcaaacgtgagtcgagcctccttataaaaaacgctctgacatttcttatttttttaatcttctaagatctctgttccttgcattgcatgaaacaaacaatatttcattattatatctcattaatatttatattaaaatatatatttctaacaatacttactacttatatatatttatttgacattttcataaaacatataccttatcctaataaaaataggatgtcaaaaaggtcttttaaccattttacgacatcctgatttctaatttatacttttgtttagagtattacacatcacatatttctatctttctaacatgcttagtatgactccactctttattattcttatttaatataccttgaattgtaattggtatccatgttaatgtatataacgcatataaccagaatctaaagaataaaattaattctttctttcctagtaatattcctgttaatatcaagaatgctaagttataagctaagccactcacccaagcaataatccaattatccatattagctgttaaataaggaactacgaaaacattactagaatataataccatcataactaagaatggttttgtaatttttttatcaattgttaatattaacggagtaatcaaaaattgaatagccgcaaatgtcttaaatccaacatcactaaacaaataatttataataaatatatttacgcctgtagtatttgcctgtattaaagttaaaactgctgaaataccaagtaataacgttacaaaaggctgcaatacatatagtgcgcagtcaaatatataaaactttctttccattattgacttcttaacaagcttaaagaaatatcttgaagcaacatctgtaaaaccttgcatccatctttttctttgagtccatgattgtttaagctttagtggtttttcatcatatataatcgcatcatgagcccaaccaactttttctccatttagtacaagcttacatgagaattctaaatcctctgtcaaacaagtggcaccccagcctaacttcttcaatgtcttagtttcaatggcaaatcctgttccaccaatttgattagaaaatcctatattagctctagctaactggaacattctattttgagtccaaaaagctattgaataagcagctgcaatccatgaatcatctggattcttactgtctatatatccttgaacaactttgtaaccttcctgcatctttgaattaatctcttttaagaaatctttatgtacaagattatctgcatcgaagatagcaatagcatcatattgtttttccattgcaaataactttgcaaacatccactctaacgcataaccttttcctcttttatcttttgcaaatctttcacaaacatttaccccgtaacctttagatatcttagctgtatcatctgtacaattatctgcaataacgaaaacatcatacatttccttaggataatctagttttagcatactctctatgagactaccaataacaacttcttcattatgtgctgctattaacaatgcaaatttatttttaggttcatagttcttattttctttctttctgaaaagccctataagtcctaaagctaaatagtaacatgttattgcaaaaacaaaaatttgaaaaaatgctgttatggtaaaaatgtattttcccattacattcactcctaatatttaatgagatatattcccatttattattttatatctatcatcatactatacctatttaataatatttcaataaaaataaaaaatcaaccctattttcttaagataaaattaatattggccaatttcaatccttttcatcatccaataccaagctaatcatataatagctataaaaattttttcaacatttacctataatttattatgtgtttttattaactaatttatagttaatatatcctgttaaaattccaccgataagtccaccaatatgtgcaaaattatcaatattacttatactaaaacctataaataaattcactcccatcgcttgcaacaagcttgataaataccttttatttattctcttcctttctataatggcaaacactactaaggctcccataaggccgaatatcccacctgatgctcctaccgataaatatggactcataaaataacttaatagcgatgatgttaaacaagaaaatatataaataataaagtatttatacaccccataaatttgctgaatttctggacctaatatataaagagaatacatattgccaactatatgtattaatcctccatgtaaaaaagcgcatgttagtagcctccaatactgcccctgattaattaattcattaacctttcctccatacttaagtaatacccaataatcaatattgaaaatatttccagataaaagtgcagttaataaaaatgtaactatatttattcccattataataaacgttaaatttttatatttccaatactctttctcataataagtacttttatttttatttacctgtagaactccttcaaaaatctgctttaatggaatgcacgaatcatcacattgtattacactattattttctttatttattataaatttatttcctaaaaatgaattattcgtatatgtatattcaccattagttaagattatcacgtttaaggaaaatgcttttcctaatgattttatatattcaaatacttctaaattatccatgtccacttcttctatttcacttattagaacacagtatattccatctttcaattctttaattgcaatatacttttcttctttatgataattactataatattgcttcatgtagaaattttctctttttattaaaaccttatacaattcttctcttaaatcactcatattaatctaccattcctgtataaaaattcaatatatattgcaattgtcaatgttcaatacccaacatggcacccttttagtgcgtcaattatcacttaatatagatttccttggaaatctttaagctatgaataattctttttgcaatatatattagatcaaaggattttttaagttataagataaaacttaaaatataatgcacagttcacattaatttatgctatgtgaattgtgcattgattgtgctttacttttctatcatatctaaaagttcattaaatctttttattgtagcttctattggcacatctgttgtcatatctactcctgcatttcttaaaatatttattggataatcacttccaccagattttaagaatcctttatatttttctactgcattttctttaccatctaagatagccttagaaaaagctgatgctgctgcgtaacctgtagcgtattgataaacataaaaatctgaataaaaatgaggaattcttgaccattcgacatctacttctttatctataacaatttcatttccaaagtacttaacatttagatcatgccaagctttattgtaatcttccgccgttaatggtattcctttttctagagtctcatgtgtatataactcaaattccgcaaacatcagttgtctaaatacagttgttcttatttgttctaattcttgatttattaaatataattttttcttttcatccttttcattttcaattagatagtgaataagtaatgattcatttgttgtggatgcaacttctgcgcagaataatgtgtaatttgcatagtaatatggctgctcttttcttgaataatatgaatgaattgaatgccccatttcatgtgctaaagttgaaacatctcctagctcattattataatttaataaaacataaggcatagtatcatatccaccccaagaatatgctcctcctctttttcctttgttttcatatatatctatccaaccattattaactccacttttaaagatatctaaatactctgttcctaaaggacttaacgctttcaatactatatttactccatcattaaactcaattttttctttcggaatttcaatgactggaacatataaatcatacatatgaatttcatctaatcctaatagttttttcttaatttttacatatctatgaagtgaatctaaattattatttattactttaattgcatttttgtaaacttctaaaggaatattattaggtttcaatgatgcttccaatgcattattatattttctaactctgctgctaaaattgaaagtttttattgatgcacttagggacgttgctagagtatttttcaacttatcatattccccaaataatctttcaaatgctgcttttcttacctctctatttttacctcttatgaatgaagaatagtttccttctgttaattcaacttcattaccatcttcatcttctatttttccaaatgtcatatctgcattagttaatatattgtgtattgctgaaggggcatccaaacaatctgatgccgctgctaacaattcttccatctctttagataatatgtgtggcttttcttttaatatatcttcgattaagaattcaaattgttttaattcatctaatctgtttatttcacttttaataaagctatcatctaaacttaaaatttccggtacaaagaatgctgtgtaacttgcaagctctgccatatatatatcaactttactcattaaactttgataagtggtatttgaagtatcttcatcacactttaaatgagcataaataaataagttttctgccttcctagatactttttcattgaattttaaataatctagtattgcttctccattcacaagttttcctgaaaaatcttttaatttaaccgcttcattttttacatcttcaaagtccttttcccaatcctctatgcttttataaatcttatcaaccttccatttaaacttatcttctatttcttctcttttctttaaatcactcatataaatacacctttctttacaaaaattttagtaaaattctaaaccttatttatctcaagaatattaccatatatattcttaagaatatgcttatgaaatgtacacaaatgactataaaatatcttttatctactcagtatattcagattcttttcctttaatagcttcaaatactgcattcatctcattgtctattatagataccacttcttgtatcttccctttcattacatcatagtcatctacataattaaattttattatatatgtaggattgtattcttctaaatcttcttcaatttcaaatcctttttcagaaaatgcttcgttattaaataaatcatatattgctgagtattcccattcttcaacatttttatttgtatcgaaatacatatatacaatatcgtccaacacataaagtttttttacaaacaatgctccttcatttacttcaaaacttcctagttctttctttataaatcctgtttctttatctttttctattaatactaaacttgaaaaatccatagttccaccatcctgttatttttataataattatttttatattagtaaatcaaaacatatataagttttatgaaatctcctacattactatttttagccatagttcaataaagtatagacttaatttaaaacatatatagttaatttctcatataaaattatatcaaaaaagacattttataaccataaaaataaaacctggtaaacttttttccaaatataagactatattcagaatccactcagataataatattttttccttaactttgtcatacgcttttgtttttattatatggaattatatggtaatattttcttatgttcactcatatactgtgaatttaatcttatttattaatttcttcaaactatactttaggtacatcaaaaataaaggaggtatacagtatgctgaatagcgcacagattcaagaagagtactttgtttataaaaaaagaagaagacgaagactccagaaaaatattactctaaaaaataaaagaagactcatgttatctttaactatttctttcggaataataattatagcttcattctttatgactcgtgatatttatatatcaaacaattccaaggatctcggattttctgtagaacataactttacttctggcttctcatcagaaaacaaactccttagagttcaaaaaatgtcactgctatataatgatggtgaaactgctgttgttgaagcatctggactttctaaggctgctccccataaaaccatttcaattaaaggaagctttaaaaaggatgataagaaaagctggtgcttagaaaaaatatttgacgaataaataaattcatacttatacgatttcccttcgaaattccgtacatttttgttccacaggactatgaaattttcgctgaaaggttctaaccacaaggttgtgcccatttctgcatgctcccatctcaatgtgacaagcacaactggaacaaccttgtgctaagaaccttagcagcttaatttcaaatgcttgtttcacaaaaatgtatggaatttctagtattgaaacaaatttaaagtataagtaaatataataattcaaatatatagatacaaaaaataagaactaaaattgtgcactatatataatactagaaagaaggaatactcttttgtggaggattgcattgagaataaagctgtaggtatttcttcattaaaagttgttccatttctacttgtccttgcttgtcgcaggagcatgcagaaatgggtacaacttctaatgttagaaatccacagttttattctctagcataccggaacaaaaaagtattccttctttcggcgagttattgaataaatgcgagttcacatttagatatcatagattttatctagtttctaagaacgcagccaacttattaacagttgacatatcttctctttctaaatctgtaggttgtaatttgattcctagcttttcttctatttgaattaaaacttcaattattgctagagaatctagtaatccagcctcaaaaagatctaaatcaaaatcttctgctatttcatcatttcctgtaacttcaataaatatttctaaaactttgtctttcataataatatactccttcttatagtactaatttttttaatttcttagcttgattatttctatttaaataaatatcctgaaaatatcagcataccaaaacatactatgtgaaatgttattaaaacctgagcataattaaaccatttctcttttttatgtttcttataaaaacttgatttcctctgataaatatcagttaaaactaatgcaattccttgatataatccataaattatatagtatgcagttagtccatgccataatcccattataaacatagtgataatttgagccacatgggaagcgataaacctattcttaaacctcttttttctcatagaatttaacacaaatcttgagaaaatataatctccaaaccatcgtgataaagatatatgccatcgtgtccaaaattctttcatatccttacttaagaaaggtttattaaagttatctggtgttttaattccaaagatataacttgatccaaccgcaaataagctgtatcctgcaaaatcaaagaataaatacatcgtgtaagcatacatataatttacactatttaatattgtaatacctgaaggtatttttaacaaccaatatgtatcaattaaatatgctaatataaatttataagcaattgcaataaatatctttttcagacctggaattaaatattcttctaaatatatattcttttctacttttctatttaaatcatcctcaaatcttttccatctgtctataggtccagaacttagggtcggaaaaaatgttataaaatgaataaatgtcataaaatttatttgagttattctaccatcataaatttctattactacttgtattgccttaaagtttagatatgataaaccaataaaaccaatgtaggaagcataatgtgtaacccctgctactttagttaatataagcggaattattgatgcaaataagaataaccaatataaatatttattatctgttttctttctaacaaacaaatataagtatataacaaaaatttcgccaactaaaaacattgaaaataaagctaatcctaaactttttcccatgatcaaatatatcattacagccgaaacaattattccataatattttgatttaatcccatttagccctaaaactatggcaggaataaatgttagtagcaagatatataagtaaaagtaatctccgtattgtgtcaacttcattatacttcctccaatagttttttcctatcaatctttccatttacattagtcggaaattgcttaacaatttttatatttctaggtaccatgtatgaaggaatcaaatttgccaactctttctttatcattattccattttttaatccacttaagccattatcttcttttaactcaataaacgcagttaaatatgcaatttttccatctttctctattggaacaacagctgcattttttatattactaactttaactaagttattttctatatcttctatttctattctaaaaccattaagctttatttggaaatcctttcttccacaataatataaatttccatttacataatagcctaaatctcctgttctatatgctctacatttagatccatcataatcatcatagaagaacgcttttgcagtaacttgttcattattaaagtatcctttgcttacactagggcctacaattactatttctcctttttctccatcacctaacacgttgccttcatcatcaacaatctttacaactgatgttttcattggatatccaataggcaagcttccttcttccaacaataattctttgttcatatcattagccgaaactgctacagttgcctctgttggaccatatccatttaccactcttgttcctgggaatctatttataagttcctcgcataatggttttggtaatacctcccctacaaagatcattgcttttaaattctgaagcattgtagaattaaaatctttttctgcaacgcacattcctgcaaatgaaggagttgatacccatatattaatatcagattttctcatatcatcaaacatattctttaagtttgaaagtgtttcttttgaaaacccatgtaatgttttcccataacataatcctgggtaaattgatgttacagataaatcaaaagagtatgcggcctgattcatgaatacttcttctttttcatctaaatttaaatattctgcaatccactcaacaaaattatctaaattgttactgcttatttgaacaccttttggctttccagtacttccagaagtgaataatatgtatgcattttcatcttcttttacccaattttctttttctactttaacatctttatattcttttactatttcttcaatatctttatcttttaagatccttatactttcaaaattgctttctttgctaaaatcaataagaacctttggatgaacctcactgataattgcctccactctctcttttggatagctaatatctattggtatataagctcttcctgactttaaagaagccatcataactgccatcattaaattttccttattaccatatataataataggcgttctatcatctttaaattcccttaataaaaaagctgctatgcattctgatattgtatctaattctgcatatgtcataatatttccatcacattttaatgcgattctattactatttgagtatttttttatgccttctaaaatcttcattatttatatctcccttaaaattgattatatacaaatggtatttcagcaaatggttcaaatgttaatactagaattgctaaaataactacaattgaacttactaatgcaaatcctaaagctctatttttctttatttcgtttataaagttgctcatcaatttcaagccatcctttccatcctagatgcattacatcacacataaaataaggcgtatattcttgatcttttaagttcaaaacttcaaatcctctttctttagccatttcttccactttatcgaaaaactcatctctactttgcttagtcattccagtgtaatcataccatcttccattagttggtgctaaaattatatatggctttataccaagatcaacacaagtgtctaaatataattcatagtcatcaaattcttttgaattcattaaatcaacatttttatttatatctttttgagattgtaaattattttttaaattcttgtcataatatgtgtcatatacgtagaactcattattagttacttgtttctttgcttcttcctcggccttcttatgctcttcattccaatcaactgttcttagctgtttttctgatttttcaggtagtttctttaaccttctatataatagacctttgtctttaagttcaacaatattttcccttgcaacaaaatatggcttaaatataacacttgatactttagatattaaattatcgtttgtataaagttttgcataaagcttttctggtatatattgtgagcttcctgataaaagcttatccactctagctgcatatgtttttttatgttcttcacttatttccttatttgataaaaatttataaaattgcactggtgcaaaattagcttgaaagtctgtcccgtcaacaccatgatcactcataaaccactgaagtgaaattataaatgcaacatttggtttcctctgggtattctggcttcctaaattagatatctgagtcaagtcctggcaatatgctctaccattagttacgattgtatccattccttctacagggaaaaaggttgtagctaattgtgagactggtgcccctaactctgatgacccttctaataattgatagttattatttgtaacaaattcattatatacgagtcctctatctttatagctgctcccatactctatatttatttcagttaaatccttgctttttaacatagctcctatttctttatctaaaaaaatattaagtaacataacggttactacagctgtaataatagggaataacatatatataagcttttttttcatttgtccctcctatttcttgtttttctactacgatttccatttaattctatactaatttaagacatatttcaatgcaaaagtcccttctatcatagtatataaaatcatatgatgagaatatatattcataatcaaaggcagctttctatgacaaatttttatagtattgtagtataaaatagttattgtattggatattaatcataatataaaaatatattctattgcaaattatttgcatttgagtgtataatataataatgctttaaggagttgattatttgattactataaaaaatctatcattttcctatacaaaaggaacagatttattaaaaaatattaatcttaatatacctactggaatttatctatctatacttggtgaaaacggaagttgtaagagtacactagtaaaacttatattaggtcttctaaaacctgatagcggttgtataagtttagattctaataaaatttcatacgtttcgcaaagacttgataattttaatgcagaatttccaataacagttaaggaagttttgtcttgccatgccaagacagtgggaattaagaattcaaaatccattcaaagttctctaaaaaatgtaaatatgagtgaattcagcaataaattaataggcaatctttcaggtggacaacagcaaagaatctttattgctagagcattaataggtgatcccgatctaataatattagatgagccatcaactggaatagatgaaaagagccaaaatgaaatatatcctctactccaaagtttaaataaggatttaggaaaaactattatctctgttgaacacaacactaaggttgcattaaagtattcaacacacattttaaaattagaaaattgttctatgaaattatatacaaatgaagattttaaaagatatttagaatctgaggattcattttacaacataatttaagtagttaaactatatttaggaaggtaataatttatgtttcaattaggttttatgcaaaatgcatttattgctggctttattgtttctatgctgtgtccttttataggactttttattgttcttagacgttattcaatgattggtgatacattatctcattcatcttttgctggcgtagcaattggtcttgttttagggattgacccacttttaactgcattttcatttactagcatttgcgctcttgtaatagaatttctaagaacgtattataaaaaatatgcagaacttgttatgtcaattgttttgacattgagtttaggaatagctattattttaataagtagtggtaaagcttcagctaaagtagattcatttttatttggaagtattttaactgtaacagattctgatatctgcttaatcgccattgttggaggaatatgccttatatgtcttctttttctatacaacaaattaatatatgtaacttttgatgaaaatggagcaaaaacatctggaataaacgttaaactcgttaattatatttttacgctgcttgttggtgcaacaatttctctttctataagagttatgggtatccttgttgtttcatcaatcatagtggttccagttgcaacagctatgcaattaaaaaaagggttcactacgaccctaatttttgctattatttttggttttgtggatgttatgataggacttatatcttcttattatataaatagtgcacctggtggtactattgccttaatatcggttatagttcttctattaacactaatatttaaaagattttttagttatgaagattaggctaatacaggtattatcatataatacctgtaaaatactcttctaatatttttacaaatctcctcatatcatcttgatatatatcacctatattagctattctaaatgtgttttctgaagatatctttcctggatatatagtaaatcccctgctatataagtaatcatgtaatctatcgaatttataattttttatctgtggctcaattactgaagtcaaaagcattgatgatatgtttttatctattagtctatttaaattgagtttatctagtccatcccataaaatttcacaacactctttatatctcttatatctcttctctattgtctcacccttagcctctattattgcctgctttaatgcataaagtatttgaactggcggcgtaaatctcatttgataattatctttaaaatatgaatattgtttgtatatattaaggtagaggtttctaggttttatattttgagtattattcaaagccttcttatctgctactacaaagcttattccagccataccttgtatacatttatttgaactcgatgctaaatattttatattcatcttatacatatctataggaatacctgcaaatgaactcatagcatctactatcatctcaatactatatttcttacaaatttcacctaataattctatgtcatttaatatccctgttgtagtctcatgatgaactaccgctaaatggcttatagctccacaattatttattttgctttcttcattattctttttaattacttcttccaactcttttaagtttattgtttctatttgagagcttttaaattctatataattcaaattatatatttctgcaatttcacacattctcttgccataagcgccattattaattatcaatattgttttattatcaactaccgaacttaaaatcgcctcaactgctgcagttcccgatcctccaaataatatagttgtatacttttcatttgaacctacaaattcagtaagttctcttgatataaactccataatgctcccaaattctttttctctagggcaaatatctggtacaatctgagcgaattttactgtatccgatgtggtagctggtcctggatttaataatatatttcttctgatttccaaattaatttcctccctgtatagttttatcaaaaaaaaacaacaactcaccatgtatattaattctctaaaaatttcataaacatttccttattttcaattggtgttgttgtaggtctccccaaattttttcttgaacctttttttacttttatctctaaaaatataggccctttctcattgcttattttttccgataacctaactaattcatctcttgaactacacgaatagaattttttatatccacaagctttagcaattgctaaagtatctattttaaatcctacagtttcttgacctcctactgaatcatgagctccattatttatcaaaatatgcttaagattatctgcattttgatttcctattatagctaaaccaccaagatgcattattaaagcaccatccccatcaatacaatagacatctctgtcttttctgcttaatgcaatccccaatgctatttgagatgcatgtcccatagatcctactgttaaaaaatccttactatgatctccattatatctttccctcaattcaaaaagctcacgagaagccattcctgttgttgatactacaaccgatttttctttcgcattagatattaatatttctatagcatcttccctagtcatttctaaatccaaagttttatcatactttatttgatattcatcaaaagtatcttttttcactaccaatgcatagggctcgttattttccttcatataattatttgctttccttatctttttcctcatttcatcattgcttgtgttattttctaaaatatcatatttaatgcttagaatatccaatatttcgattgtaacaagtccttgtttcttatgttgaggttcatctttcttatttggctcacctctccatccaactattaaaagcactggtatactatagaccaatttatctgtaagggatacaagtggatttaatgcatttccaagacctgagttttgcatgtatactaggccaattttctttgttgctaagtgatatcctgctgctattcctattgcattcccctcattagctgaaattatgttcttttcgctacttacattttccttaatgtatgcacaaaaagactttagtaaagaatctggaacacccgtaaagaaatctatattgttatttaatagctcattataaaactcttttacttcaatcattctttttaactcctttaacattacgcttatgaaaactatattttcggcatactccaaatataatattttaatagtaagcaaatggaacaaacactcaaatatatataatttcagttgtttacttaatttctttacattcctcctggaatcaaagtaagtatttcttttataggcatacaattgattgaagcctctttagatcgtccattctctaaaatgcttttcgctgtatttaccattgctggatatgcacttcttatcagatgatttgcataaataataacgttaactcctaattccattaactcttcctctttcataaaattatatgaggttgggactactactaaaggtactctattttcaaactcattatatcttctacagaattcaataatttctcttccatctttctctttactatgaatcatgataccatctgttcctgcttcaatataagctttagccctttttatagcatcatccattccagcgcctgcaattaaactttcaatccttgaaattatcataaaatcactagtcactctcgcctctctcccagctcttattttgtcacaaaaatgttctattgtatcttgagtttgcttcacttctgttccaaataatgaattttttttaagaccagttttatcttcaataataatagctgaaactcctaacctctctaaagtcttaactgtataaacgaaatgttcaatttgtcctcctgtatctccatcaactattatcggtttcgttgttacctctaagatatcattaattgtatttaatcttgatgttaaatctaccaattctatatcaggttttcccttagctgttgaatcacataatgaactaatccacattccatcaaactcttttattttcccatccctttgaactttagtcttttcaacaatgagtcctgttaagccattatgagcctcaagtattcttaggggtttctttgaataaattaattcctttagacctttcattctcatttgaggtgttatacctattttagctaattcttcatctaattttgaaatagaaacccctttagtatatggaacttctataagttctccttcccattgttttaacacctctataactttttctcttaattctttttgcgagccttccttccaatcatccccgtgaagaacatagttaggtctaattttaagaaggttttgaacttgatctaagctttcttgaggaactacagatataactcctttaatattactaatcacttcttttctctcatcatacttcattattggatttctccagtaacctcttataacctcatctgtatgcaatcccactattatatctccaaattttcttgcttcatttagtacatttaaatgtccttgatgaattatatcagcactcatagcaacataaactgttttcatattctttcacactctcctattttctacatttttatatgcatatttctagacgttaaaacttaactataaaaaatctattaatctagcgcatgtccaaacttttccctctatactgctctctcttctgaaattttttctagctttggtattattgatttctttattctttcaagatgatttttatcatctatttctccccatactaaattttcaatctttagatatcctacttttctttttttagcagcatcaaatattgcatcctcataatcgtatttctttgtcttctcgcacctatcttcaaaaatgatatcataatcatatatttttctattgaattctttatactgcttcagcatttccttatatagctctaacgatattttagaaatcccaaccaattccccatatacatgtcctatatcttctcttcttttagatattttatataagttattatctctaacttctacatagcattcatctccagaatctgtttttccacttagtaaaatacaatcattttcctcaaaatttatagtctttatcagtgcatagacctcatatattaaatcactttcaagtagcaaaaagtcttcctttaattcatcttcaagaatcgaaagagaagtcatgctgcctgtagctttatattttctattttttcttgtttctatataatttttatcttttgctagttcatcataaaattcatgcaaatgtcctgtcactatataaatcttatctatgcctagacttcttaatttttcaatagatctttctatcaagcttttcccatttacctttataaatccttttggtaacatatcctttgttatatcctgcaatcttgatcccattccagctgctaaaattactgctgtttttacttttcccatttttcccctccattaagttcatattttgaacaacattatattaacacctttcattgttcaaaacaatatgttcatacaaaaatttactttaattctaaaaatatatttaaatcatatatattgtaattaagttgctacatttaaaacatgaccttctgaatctgccttttccataatttatatccacaatatccatagatttcattacaatataaattcctagaaaataaaaaaagctatatcaaaacgaaccactccttatctacttgataagaagcggtccaattctgatacagcttttatttaattattttaaagtattattttgatactacatttgtagatgatgctatagttgtgtttgttgctggaaccattaatttattaaactcttcttgagaaacttttaatgtgctagttgggaaagttatccctttgacatcactcttagtatctgttgttttcatagttaatgcaatagttccaaaatctttaatttgtaaattcatattgaaatctgagctataatcattatctgtgaacacttcttttgaattaatagttgttccagctaatgatgccttaatttcaggtaatgatttatcaaattctgggctgttagcagcagttttcatctgtgtaatactttcagctggcaatcctaacttaaatgtactattaagattatctaaattattagctgttgcttttaatgcttttgcagctaaatctacagttttatctgcatcaagatttattgtatattctcttccattttgaacgaaaggtaaatcaagatcagcatttcctccaaatatcatctttccgaattcaaccattccatctggttgagtcattagtgattttatttttgttgcatcaacacccgatgcttgagtatcaattcctatatactcttgagttatattatttaaacctgttggagcgctttgtccagttaaagaagatatcccttggtaaaagctcttatttatataacttgtagttccatctgaatatgctttaagttctggaatattaagctttcctgctggatcagtaaatgtcatatcaacatatgatttatcttttgctgtatatccagtagctgcaaattttatttcttgttttgtttcagttccatcttttccttttacattgatatttaagtctccatcaatacttgatgttgttgcttcccatttagccgtatttgaaagctcctgtgcataattaagtgttgcttggctacatcctgccattgttccaacagttaaagctgctgtcataatgaatgccaaagtttttttcattttcatttttctttccccctgtaaatactcatatttatccgatagctagcatccgtaaaactcccacttcttcaagccggagataacggctgcacgctcctggataagttcaactaagattcagatgaggatcaaaccccacctgaatcaagtttcacttgatgataaaaatacaatgtatgttaataatttacttttcatcatatttctattatacatatttttcattaataaatgatagaaaaaaatattaaatttaccttaatttatacttaatatttctaaatattttttaacaaatatctttacacactatatttcttttgctttacaaattttatatgaaattttatatgaaatatatcctataattattgtgactaacatgctgataattattaatattaacttattatttataataaaatctaaagaattttctaatataaaaccatccttatttaccaaaaatgatggtaacgcaaatatgaagaatgcaggtaaaagatatactaacaacgatactgctttgcccttttccattccgagcttgtaatatataggatattgaataaagcaagttattaagctcattaacccacaaaagaacattgttaaaatttcaaaattttgaattctattaatctgatatagataggtcacaatagatgtattaatgagaaatataaacaaagctatacctattaaatacaaaaaccttccaagaaccatatcagaaattttagcaggaaacatataatacatctgagtgcttttttcattaccttgagtactaaacggtattgttgccaaaattattaaaaagaaaaataagtatgataatgccatactatatgtttctcctgaaaacataaataaagcacaaaatatcgctggtgctaacacataaagcctaatactttcttttattaatcttaaatcaaatcttaaataacttattgatctactcatattttaaaacctctttctctttataaattctacatagaattaatactaaaacataatatatatgtcacaattcacaattccagttaaaattcttgcaatatttttagaattatgatagagaattatttttgcaacgtatatgcatagaatattttatactaatccctttttccattgatataaaatatcacgatgtcatccatcgatggtttttctactaacaaatctttacttatatgatctctattctttgagtcaattaatccttcaaatccaaaattagaagacttatatccaattaacttctcttttaattcttttgttaaatcatcaaggccacctttaaccaatagatgactttctagtacattttctgttatatcataaaacaccttttctccattattaataaagaatagataatctgttatcttttcaagatcacttgttatatgggttgaaaatagaacacttttttctccatccgctatatattcctgtaatatctctaaaacttcatttctaactactggatcaaggccacttgttggttcatctaatagaagaagttttgtatttcttgataaaatacttgcaaaagacaatttaactttcattccctttgaaaattcttttatttttttcttataaggaaggttccatttttcagcatattcattaaatttgctttcatcaaatgaagtataaaaatcttttagcgtactaattacatcttttaatgtaaaatttattggaaaatagcattcatctccgataaatcctatcatgtctttataaacttcttctccatcctcataactctttccaaatacttttattactccactatccttttttaattgattcattataagctttatagtcgttgttttcccagcaccattttgtcctacatatcccaatatataaccttttggcaattccaaatttatatttttaagttcaaatccatcaaatgttttatttaaattctttatttcaagtgcattcatatttccctactccttaaaatcatatttttaataataacgtgcattttaacaatttaactttcacatattctatccgatagctagcctccgtaacactctcttataacggctgcacgctcctggataagttcaactaaattcagcttgagtataaaactctaccttaaaagtttcactttatgtaatttgctcatctgccaatgtttttagcatagccactaattcatcattggatatatttgctaacttactattttcaatcgcaaccataagagcttcttctattttctttaaatattgttcccttaccatttcgctatccttaggaagtacataacttccctttcctctaagagttgctataaacccttcactttcaaggtctgaataagctctggttgtggtaataacacttatccctaagtctttcgccagctgtcttattgatggcaaaaactcattttctaaaatttcgcctgataggatttgttcttttatttgagctttaatttgctcataaataggcaaatcagatttattagaaagtaatattttcaaattactacttcgcctcctttgtgttcatactgtatatatacaatatatacagtatgaacagttttgtcaataatttttttagtacactttgaattcaaaaagaccattaggtgatttatattctcacctaatggtctttaatatcttaattctatttttttaatttccttctgctataactttatcctgaacattattaaatacatctttatccaattcattaaagctcttagcaactgttactgctgtaaccattgatccatcaacattaagcgctgttctcgccatatctagtatcggatctattgcaagtattcctcctgcaagagggaagaaacttcccattcccattcctgatattactactgatactgacattattgctgttcctggtaatccagctattccaaaggaacttataattatagtaattaccagcatagcgtagaagctaaaatccattggagttccagacatatttgcaattgtaacagccattaatgctggatatatagcagcacagccattcattcccatattagctccaagacttcctgcaaagcttgcaattcctttttcaactccgacttttttattcaaagtctcgatagtaactggtaaagttccaagacttgatctagatgtaaaagccaaaactaacggctcaattacatttcttaaatattgaataggatttaagccattaagtgaaattattacaagatgaattacaaatacaataataacacttacatataaagcaactatgaaattaaccacatttattattgctgatattccatttgatgcaactgtatttgaaagtagtggtaatacagcatatggcataaatctgataactgttctagctacagtagtcattatgttatagaatgcctctataacatctattgctggttttataatatctttgtttgtcttatttagttttcttatagctattccaagaaatgctgcaaatataacaacagccactatgtttgcatctgccattgcttttattggatttgctggtaaaagtcctctcatagtatctacaaaagatgttatttcttttaattcagctttactttggattgcttcaactccaacgccaagtctaaataaatttccgattattatagcaactatcgaagcaatagctgtagttcctaataaaacaaatattgatctagaagtaagttttcctaagctttgtttttcatccatgtttattataacttttaacattgaaagaaaaactaatggtactactaacatttttaataggtccatgaatccatttcctactagcccataccattttgtaacctcacctatccaggtaacatctcctgtattgcttggaaatcctgctatagattgtattataactccaagtaataatcctcccacagttgaaataatcatacgttttgaaaagtttaatccagccttttctaacttataaagtccatagaataaccctattaaaattgctataaatattattggtttatagcttgttatcattataaattttgaaaaaaatgtactatccattgttacctcctataattcctacaattcctatataattagtatatttatagtatcaattatatgatcatatgtcaataaaagttaatactatttttaaatatattctttctgaaaacatatacttcttaatactttataataattatggaatacttattattattttaatcaaaatatcatttaaaatttatgacaaaaaaataaccaccatgaatataactttcaattatcaaaagctaatattcataatagttatgtaagttttactcatgaagtcttcttataattttatatgcaaccacattttccatgaccattggtgatttatgagcaaaaaagattattccatcagtaggagatgtaattttttcaataatttcaccttcatatggatgaattatttctgcaagaacatcgcctctttccactccatctcctggattttttaaccttctatatattccacctgtagtagtctttaccgaaagcaaatcatcttcctgcaaaacactagctatgtatccactgtgactagtatactttataactcccattctagttaaaaatcttaatacagccactactgcatgtttggcagaaacttcatcaatttgatctgttgcatttgtatataaagagaaggcacttgcattccacatctgccaattgtagtttaatgtcatggtatcataaggtttcggcttacgaattaatacatactgaagtccaaataaatttgcaagacttggactctgatatcctgtttccatcatccttatatgtggaataaaatctccaggcatgtaaaaactagcaaactgtattccatacgtataatccttaacttgttcaaaaacaccacttgcaattctctgagttgtttccccatttacttctcctgggaacattctatttatatcagtgttgtccattgtccaaaatctttttcctatattcattgaatgaggatttacacaaggaatcacaagaatttcgctatgtcttgaaattgctcccctttgctctaacttagttaaagttttaatcaattgagagcacgtatataattgctgtatctcatttccccttattgcacctactatgcatgctgactttccgccttttccaaatttatatcccgttattctcatatcatctctatgaggtgactttaacgtatatattatttcttttatcattttacacctccaagcaccctcgcaataagtgacccttcataaacaactggatattctctcaatgtaaatactactccatcacaagatgaaataacctcttcttctatttctccagttaaagaattaaaaatctctccaattttttcttctctttttatttcatccaaatgttttacacaaggcataaatattcctgatgaattagcatttataaaattcacttctttttcagttgatattatggggtctcttacaggatttactgtaccattccatatgtccaattttttcattaaattaaatataccttccactaattgatccccatattcttgtgtaattctcattccaacccccatctctacaagcaatgttggtatatttttattatttaagctatatgtaagtgttgattccagaacagtagactctggatgaacccatataaaatccatattcaacagctttgcataaggtactaatttatcctttatatgctcactcactctaacttgaggcacttctctcaaaaatatattgcttgcatgcaggtctatgcatatatcagccccttctatatcttcaataattttagctgcaacatgttctgccattgctccgctttcagatcctggaaatattctattcatatctaaatcaaatgttggcattcccctatgtactgaatctattccaagcggatttaaagatgggtatatatcaacaattccatttaagtatttaatattttctttaatttttcttattaatttataacatacatattgaccttcaagttcatctccatgaagacctgttataatacatattcttttagccttttcattaatatttactgatgtaagtctattttttttgattactaacttttcatcaaccgctaatcctaaagatactaccgtttctaccatgttcccctccatatgctcacactcaaaaacctattctgtaaaaacaatctaaattaatattattattgtaaaaaaattttcttttatacaaaaaataagcaaagaatcccactgtgtgagcttctttgctttaatctaatattactacttggatattttattgtcaaacttttttacatgccatatataaaattactttccaaaatatttgaatattatttatatacactcttttattgattcttccaatacatcaattccatatttaacttgttcatctgtcataactagtggtggtaggaaacgaattacatttccaagtatacctgcatttaagaatataacaccattttcataacattttttaattatagatttaactaaatctgctgctggctcttttgtgcttctatcttttacaaattctaatcctaccattgcacctaagcctcttacatcacctataactgtatacttttccttcatctcatttagtctttccataatatatccgccaagttttaatgatttttcacatagattttctttttcaatcttctcaataactttaagcgctgctacgcatccaagaggacttccagaatatgttccgccaattccaccaacacatgctgaatccattatttcctttttagccacaactgcgcttagcggtactccagcagctattgattttgacatagtgataatatctggttctataccataatgctcatgtgcaaacatttttcctgttcttgcaaatcctgcttgtatctcatcaactataaatactatattgttctcattacaaactttttgcaattctctcatgtattttgcagatggaactacaaatccaccttcaccttgtaacggctcaattattaaacatgcaatcatgtctggagaaagtgttgttttaagcatagtttttagtctattaatacattcatctgcatattcttcttctgaaactccaagtggtgctctatacgaataagggaaatcaaatttatatgtttctggcgcaaatggtccaaaaccatttttgtatggtttatatttacttgttattgacatagtcatatttgtacgaccatggaaagacccagtagctgaaagtactcctgttttcttagtataagtccttgctatttttatagcattttctacagcctctgctccactattagcaaacattactttcttttcgtaatctccaactgttatttcagttaatttttttgccaaagcaccgtaagattcatatgttactacattatagcttgggtgaataaataattctgtttgtttctttatctcttcaacaatctcaggatcacaatgtccaacattttgaacaccaattcctgctgcaaaatctaaaaatacatttccatctacatctttaattaatgctccttttgcttcagctatagcaataccagttgatactgaaactccatcggcaacatatttttttctttcctctaatatctctattgatttaggacctggtattgatgttactaattttacatttgattcttctatcattataaaaccctccattaacgtttattttcttaatatatttctaattccataaaaaaggagccatcatgtttatttacacgaaagactccattgcctataaaatttatttaaatttcttaacttgtttatataataatactttctatttttcttttctatgtccaagcattataatgtttttgtctattttgactaaagtcccaacatcaaatacacataaacatattaaaacttagattaatacatgatcaaaattaatgtattagtgcacattgactatattatttatcttcctatttaagaattttaccaatgtctagtgcaatctttactttaatacaatcattaaaattccgtaaatcacaatttaatagttcttctatttttttaattttatatttaagggtgtttctatgaagaaatagcttttccgctgtaactgtgatattacaattttcatttagatacatttctaatatttcaattaaattattatctttattatcggcaccactaattggacctaaaacttctgaaaaatagttttgtaatatgctcctattctcaacgctaaaaagcaggctgtaaattcctatatctttgtatcttgtaattgtgtcatctaaaccttggcatttagcactatctatagctagctccgcttcatttaatgattgtttcatcatttttaaatccttgtacgagtttcctattcctacacttacagacattccatccatgcgattctttgtagctaactgtatctcttttaaagccttatccaatctattcatacaattttcttctgacctaataaaaaagattacagcatcatccttatctattattggtacctttagtgcatgtttatcaagtatatcttgaactacttttctaaagtttattttaatcttagatatacttttctcatcacctaaattctttaactttaagtatctctcgaaaccatcaatatctataacacatatgcaacatccgcctgacagattatatccaaaatatgcagccttttgtattgcatctccttctaattcaccatccccaaatagaatattacttaaaaaatgtgatagagaattctcttcaatacgagataaaataatagcattactaatttcccttgagacttcaaccagtttaacttcccaaggtaatgtgaacaatggaatttcaagttcattagcgagtttaatcgcctcttcagatacattccttatgtatggacctatatttactatcaatcccgaaccatttttttcactaattcctttaataaaatctaataatagcccctcattttctctaattccaacgccggttataaatatgatttctccaccttgcagccatttaattccctccaatggattctcaaaacattctgccacatatatccactctatgcttttttctaagccaccttctccaccaacaagattaatttttcttaaggaatctaatttaagtatatcttttaccgaaattgacataaacttcacccttgcccctctaattatttaaaatgtcatctttatttattatatttttataataatatctcctcataaaaaaagatataatattataataattttttcatattaaaaagaaggttgatcaaattcttattactctcaatatttattgatataattagaatttgctcaaccttctactaacaatttttcatatgctcttttaatatgggtaaataccttgattcttagttacagtttttacataaatgtttataatagaaaataatttaccaagtgacacctaaataattgttcaccatatacctcactagttaaatttcaacatctttttttctaccagttttactagttgtgcaagtggtaaacttaatattaaataaaatcctgctaaaattgtatatgattcgatagttaaaaatgactgagatgcataactttgcgtacgtaataatagttcactaaccgagacatatgcaagaagcgatgtatcttttaacatcattacaaggtaatttccaaagacaggtattacattgcgaagtgcctgcggtattattattctaaacatagtttgattatttgtaagtcctaatgctaatgctgcttctgtttgtcctccatctattgataatattgatgaacgaataacctctgatatgtagcatccatagttaattccaagacctattgttcctgcaaccagtgaacttattttaaattgatatcctggattccagatttgtacaataatagatactaaaagtggtactacataatacatatatactaattgaactaataaaggagttccccttataaattctaaaaatactaataaaaatcctcttaaaatttttattttactaatacgtccaatcgcaataaataatcctaagattattgctaaaaaaaatccaaacaccgtcgcttgtactacaacccaaagacctgcctttaatgaaggcaccaagaacttgaaagctgtactaaaatctagattagataaaatatccatatacatttcctccccttctaaaaaagaatccgtctggattcttttttagtttatattgttacttgtcagaagctttaccatcttctactgatacaaaataatcttcattcattccatacttcttaagaagttttaatattgttccatctttcttcatttcatcaatctgctcgttaactgcatctgctaaagctttatcattttttctaactgctgctgctatcattccagatgtttcagctttatatggagataatatctttaaattaagactgctatcttgtgataatgtataccctgcaaccattccatcagttatacatgcatctaccttaccagtatttactgctaacattaattcagattgacttccaaatactttaacatctttcactgatccatcttgttgccacttttgagctgtttcaagaaatgctgtacctttttgccctcccaatgttgcattcttcaaatcgtctttacttgcaatttttgaatccttaggaattactatagcttcgccttccttataccatatgtttgtaaataatgctaatttcttacgctcgtctttaacatacattccatctgttaccatgtctactgtattattatttaactcaaccaacaggttttcaaacggtatttgcttcatttcaactttattaattcccaatctttttgcaacttctgttatgatttctgcatcaattccagtaaattcatttgttttagcatccataaatgcaaatggtgcatcatttgatgaagcaactgttaatacccctttttcttttgcagctgctaatgtatcctttgatttatcattacctgctgatgttgatgtagtactaggacttcccgaaccacatcccgtcataaatccaatacaactcattataaccattgttacaactaataattttttccctagttttttcataattaatttccccttttcgtaattatttttaatgttgaatctttttattatctatagtaattttaaatttaacatgtgaatttagtttaaaactctagataaaaactcctttgttcttggattttttggatttgcaaaaatctcttttggtgtaccctcttcaactatataccccttgtccataaaaattactctgtcagatacatctctagcaaatcccatttcatgagtaacaactaccatagtcataccatccttagctaattgcttcataacatctaacacatcaccaaccaattctggatctaacgctgatgtaggttcatcaaataagagcatccttggttccattgctaacgctcttgctattgcaactctttgctgttgtccaccagatagagtcctaggatatacatctgctttgtcttttaaaccaacctttttaagcagctctagagctatttcctcagcctcttttctatttttcttttttgtaagcacaggtgccaaaataacattttctatgactgtgtgcagtggaaataaattatatttttgaaataccattcctacttcttccctaagagaacggctatcaacattcttacccagtatatttttaccatcatagaacatttccccgcctgttggaacttcaaataaatttaaacaccttaaaaatgtgcttttaccagatcctgatggtcctattatgcaaactacttccccttcttttatatctacacttatattttttaaaacctctaactctccatatttctttgataattcattaaccttatacatattctcaactccacttcatctaaagtaataagaaaaaggcgcaccgtttttttcttacagtgcgccttcgcatttaatattaaattattacattgttttgcgttaggataatattatcatgttagttcccctatttctataaccataaataacaatttttttgtgcagtatgcacactatttgattcaacactaagtttattcaataatacctgaatctattaattcaactacaatttgcatataatatctgacttccttgttagatatattttaagttgttagtactcttttattatctctttgtatagttcaggtcttctatcttgaaataaggtgtagtattcggatctaagctttctaggcaattctaaatctatttccccagatattattccctctatctcatcatttaactcttttaatggtcttccaacagggtctactattttactatggccaaaaaagcccaattctttatcttgtccaattctatttgcagctactaaatacatgcaattatcaaacgctcgtgctcttgtcactagatcccaatcatcagaatatggtttttcccaattagtattaaccacaagaagctcagcccctttcaagcaatacgtccttgcaacttctggaaatgcagtatcccaacaaatcattactccaatttttccaaaggaagtattaaaaatcggaaaatcacagcctgctttaaaatatcttttctctgtatcaaatagatgaacttttctatatactcctgccactctcccgttactatctatacacacagatgaattgtatagaacatctgttagagcaccatctttttctggaaagccataaactatattagtaccaaatttttttgcaagttcacttatgacttttacactattactactttctactacctcagctaggtctttaaatttattaccacattcatatcccgatgttattaactcaggaaatactattaagtcagttttactatctttctccataatctcatttatgaatgtaaccatcttttctaaattatactttacatcacttagttttggctccatttgaacgcaagtaacttttattttcatctttccatccccttacttctaatacgtaaccctctctcttttcatcacttttagccttactttttccaaatatattactaatagcaaaacctattacaatccatgccaatactatatatggaaacatgttattaggaaactctggtataggataaacattagaatataatacatataacaaggctgctattgatgctattggtattatcaaatgaatttttccccatactttgtttcttgtaaagtaaaccatagctcctatacttgtaaatatatacgaaacaagtatagctaatgatcctattgttgccaaataatcaaatacttctataccatcatgtttaaataatgcaatttgaactatatctgatattactattattaatattaatccaaaatatggtgtattgtgtttaggatgtattttcatcattgcttttggcattattccatctctacctaatgcaaataacattcttgaaccagcacaataagatccaagcgcacaagaaaagtttgaacatgcagcaaccaacatcaatattgtaccaaatcctgctgtcatatattttgttgataaatccgaaagtggaagtgttgaagaagataaagcctcaagtccttttgcatcaagaccaaaacctataacttgtgcataactacaaactaagtaaaataaacctgataaaaatacagcacttattattgctattggaataaattttttaggattctttgtttcctctcctaaacttgaagcactttcaaaacctataaaagaaagaaatgcgaatactgaagttgaagctaaagctgatgtgctaaccccattactcttaaaaggaatcaagcttaagccatttgtagtaccaaccttaattaaaattacaactgaaagtaataatatgagcagaattgatattccttctatcactagaataattctattacatatctttgcatcaattattcctaatgcaatcattgcaatagatgctattattgagattggcatccaattcacatgaaatccaaatacagataaaaatccagaaaagaaattaccaaaccctgctgcagtacctcctgctaatgcaatataggcaagtaacagtgcccatccagatgtaaatcccattttatttcctagggctgttttagtaaaagtataaagtgaacctgatgcagatatataatgattaaattttataatcgaatatgatacgagacctactactatagttgaaattagaaatacaagtggtgcagaaaacgagcatgtctgagccattagagatatatttaatgacatcgctgctgttggtgctataatagccactgataaagccactgtttcaataatacttaaattatccttctttaaacctgatttttccataattattcctcctaataaatattttctaatttggataacacaaaaggcgcactgatttttatttcagtgcgcctttgcatctaataaattattttaaatttctatgttataatgacttgtaatatatatccttaatttcttctaatgaaaattccttaggatgatttgctatacttggtttcgaaaccttaatacagttttcagccatccattctacatctttttcttcaataccgagctctcctaaagtaactttcaaaccaatttttttcagaaagcttcttatagcatctgcacaatctgctgcatcagtgcctcctaataatttagatatgttactgtacttttctaaattactttcccatgatttttcaacaataattggtgtaagtgctgccaatcctttgccatgaacaatatcatgtaagccactcgctggatgttcaagtccatgaggtgcagttacacccgctattcctatcaccattccccctaacgtacttgctaaagttacactatcccatgcatctaaatcacttggatcattgtacactttaactaagttctctgataataattttattccataaaaagccttcatatctgttaatggctgtcctatttttgataaataagcttccatattatgcgctaatgcatcaaatccaacagatgaaagtatgctctttgacattgtcaccataagttctgggtcaataattgatgcttttgcaataattatatttgttctaagggatttcttatccttagtttcaggatttgtaagaactgaaaaacagtttccttcacttccagtcccgcatgttgtcggaactagaactataggcaatgcttcactcccttgtttaataccaaatatatattctgatatatctccaggatttttggctgaaaatgctatactcttggctgcatccataatacttccaccaccaagccctaaaacaacatcacatccagtttctttgatgacatccaccccttcatatacagttgtagtaagtggattttgctctactttatcaaaaatttcatattgaacttttgcttcatttaacaaatctatggttttatcaagtaaaccacttttttttgtactgtttctcccagttacaataagcgctttctttccatacttagcgacctcagttcctatttcattacttctccctcttccaaatagaagatttattggtaaattataattgaaattcattttaactccccctaagtagtttaattgttgattctaaactaccgataatttctgtttagcttagcattttcttataatctcaattttcaataaaagaatataaaaaaatgcctttattaataataaagacatctttgtcaaaactataataccatattagcactatatattctataattttatagacaataatttagtgcacattggacaattaataatcttcttgctatttcaatgttaatactaaaattttcagttataagataaatattcataaacaaataaatgttgtaacttttgttacatacttattatcatataaaaactatactttagttaatgaattacaaatattaatgaggtgttaattatgaatatagataatttgatgagagaacataaaggtatttttgaggaaataaattatataaatgagtcaattaataataaaaaattcgaatctaatcttttggatataactactcatataaacaaacttgctggaaagttgaaaattcatctaagttcagaggacaaatttttataccctaatctacttaatggagatgataataaacttaaaaacctagcaaattcatatattaatgaaatgggtggaatttcagatacatttacaaattataaaaataaatttaatacaaagagtaaaataatatctgaaggcaatgaagtttttacaagcgaaacaaaaaaaatcttagttgctatagaaaagagaattagtaaagaagaaagtgagttatataaattaattagataaatttatataatacttcgcatctaatcacatatagggttccgcaatgagaatcgaacttatgtgaatccccaacgaaattgaatacatatttgttccataggactatgaaaatttcgctgaaaggttctaaatggcaggttgcacccattactgcatgttcccactttcagtgtgacaggcagtaaatggaacaacctccccttaagaacctaagcagcttattttcaaatgcctactacacaaatatgtatccaatttctatgtttgtgatatctcaaattttcaagttggaaccctatagacaaataagtgttgaacttatgcatatagcttattgttggtttatctataccaaatctataatcttatataccgaaaataaactcaattcacttaaaactaagcgaattgagtttataaatgcttttcctatatattcttatttatcttcaaataatgcagttgataaataacgttctcctgtatctggtaataatgccaccactgtttttcctgcattctctggacgttttgctaattctgttgcagcaaatgcagcagctcctgatgaaataccaacaagcaagccttctgttttagataattccctagcagcagaaaatgcttcttctgttgttatttttataatttcatcatatatttttgtatttaaaacgtctggtacaaatccagcaccaattccttgtattttgtgaggacctgatttaccttctgataaaactggtgaatccgctggttctactgcaacaattttaatatctggatttttagattttaagtattctccaactcctgtaacagttccacctgtaccaacacctgcaacaaatatatctacttttccatctgtgtcttcccatatttcaggaccagttgtatttttatgaacttccggattcgctggatttacaaattgtcctggtataaatgaatttggagtctcatttgctaactcacttgccttagctatagctcctttcattccttttgctccttcagttagaactatctcagctccataagcttttataagactacgtctttctacactcattgtttctggcataacaattataaccttatacccttttgcagtacctacagatgcaataccgattcctgtattaccactagttggctcaattattactgatcctggttttaataaacctttgttttcagcatcttctatcatagcctttgcaattctatctttaacgcttcctgctggattaaaatactccaacttagctaatattgttccttttaaatcttttcccttactataatttgcaacttctaataatggggttctacctactaattctgctaaattcttatatatctttgacattccaaccactccttaaactttatcatataattcttatcagtttactatgttataagtatattcttctgtttttatatagtcaatacttttttgtatattttaaaaagttttgtctaaattacatatatatgcaattgatgataaatatacatactaataattatttttttaaaataaaatagtaaatttttatttttgatatattattacattctattttctaactatttatagtaatttattcacgattcaattattactaatttttaaagaacaaagtttcaggtgactttagataaattctgtattgtgcttcaaactctttttatatgtgtagatttcctacagaataaaaaataagcaaattcctagactcaggatattttgcttatttttctctatattgaaacacatcttgattctgatatttgttttaatatatattactttatgaatttaatcactccatcttttcttccatgtgccttcggtgtattagcaggataccctaaagctgccattccccaaacaatatggttttcaggtatttcaaagctatttaatacttcccttacttctttttcatcacaaatattctttaattgattaacccaacatgaacctattcctagtgaatttgccattaagaatatattttctaatgcacaagaacaatctgcaagtccatttgtattctctctatcattagacaacataattaaagttggaggcgcataaaagttatatccagcatctcttttcaaagcttctctaactacttttgcaagctgctccatcttttctttactttgaacaactgtaaattgccaactttgtttgttcattccgcttggtgcatttactcctgcctgtaaaatcaaatctaattcttcgtcttttaattgttcttcattaaaagctctaacacttcttcttgttaatatgttttgtaatacctcattcatgataacatctccttttacacaaaaatttttatacgttatttttccatttaatttaaagataattaattatagttttatatttaaattataccactatatcaattttataactaattacatcaatctggtctattaatatcaacttttctattcattaggtagtttgatataatcaatgttactttttctatattgcacaggtgtaatattaaactgtttcttaaaatgtttataaaaagtaggagtatccttaaatccacaagaataagaaatttctgttatattcattttcgtggtttcaagtaaattcacagcagtatttaaccgagaagaaataagatatttctgaggtgaaattttatattcctccataaatattttatataaatatgttctatcaattccaacatatttagctatatcgctaactttgatatcatagccaaagttattataaatataatcgcgggccttatcagcatatgactcacaagtgtttttttcttttatatttacctgatcatacatgcttgaaaaacacatatacaactgaccaatgagagcatattcattgtgactatcttcttcataattatgtattagtgaaagtagtctttctttgaaaatcccattactattatccttaaaaattaaattattttttgataatccacaattttttagaatagtgctagcatcattcccatcaaaacttacccaacagtactcccaaggctcttctttatctgctttataataggtagattcacctggacaaattaagaaagcctctcctctttgtaattcatagcatttgttatttacataatatttcccttttccatttaaaatataatgcaaaagatagtgatgacgaatggcaggcccaaaagaatgagatggtgcacaaatttcatggcctccatagtatattgttaaagtactgattgatctatattttgaagtaaattctaactttgcttccattaattaatcctcctctaggatacttatatattttatgaatatatatatccaactttaaaactaaatttatgtggtaacttaccgaaatcataaatctgcttctaatttttattaatacaaatatagaaacattcaacataagcacaatttttagaaacatagaacatagaaagtatacatttacaattatataatttatctataataaaatcaaaattactcaaggaggatgattatatgaaaattacatttatgggagctggaagtactgtatttgctagaaatgtgttaggtgattgtatgtgcacagaagtactacgagatagtgaaattgcactttatgatattgatgaggaaagattaaaggaaagtgaaataatcctaaatgcaatcaacaaaaatataaataatggcagggctaatataaaatgttttttaggcgttgaaaatagaaagctagcactcaaagatgcaacttttgtggttaatgctattcaggttggaggatatgatccttgcacaatcacagatttcgaaattcctaagaaatatggtttaaaacaaactattgcagatacaatgggaattggtggaattatgagagctctaagaacaattcctgtaatggctgactttgcaaaagatatggaagaagtatgccctgatgcatatttcttaaactatactaatccaatggctatgcttacaggttttatgcaacgcttcaccaaagtaaaaacaattggactttgtcatagtgtacaagtatgttcagaacatttgttaaaagatttaggcatggaagataaattagaaggtagaaaagaattaattgctggtattaatcatatggggtggctattagaaatatatgataaagcaggaaatgatttataccctgagattagaaaaagagctgagctaaaaaattatggtgaagaaaaacataaagacatggttcgttatgaatacatcaaacaccttggatactattgcactgagtcaagcgaacataatgcagaatataatccttttttcattaaatcaaaatatccagaactaattgataaatttaatatccctctagatgaatatccaagaagatgtattgaacaaattgatggctggcaaaaagaaaaaaacgaaatattacgtgatggtaaagttacgcatgaacgttcaaaagaatatgcatcttatattatggaggcaattgtgactaatactccttataagattggtggtaatgtaataaataccgggctaattgataatttatcaactgatgcctgtgtagaagttccttgtatggtcgacgctatgggaattcacccaactcatgtaggaaaacttccaactcaacttgctgctatgaatatgagtaatataaattctcagctattgacaattgaagcagcagttacaaaagatagacataaaatctatcaagctgccatgatggatccacatacagctgccgaattatctattgatgacattataaaaatgtgtgatgaaatgatcgaatctcacggagaatatatgaatgactttaaataagattagcatattcatataatttgagtatactaacaagaaaataataagttgtctatgaattattcttagacaacctattatttagctaactcaatatgaaactattatttaacataactaccataaccaatagcagttggtaattactcactacttctttataaataatctatagacttgttttattccaatctctccattaacttaaatgaataccctatctcttctatctcttttcttgaaagtattcttccttcctctggcctttcatttaatttaaagactatggctttttgccctacttcctgcttaaaatttatacggttcattttaatatccatattaaatgtatcagatactgcttctgccgttgcctcatggcctattgcagatataaatccattttcaattagaagttcttttgcctcctttatgtctatgtcacttattttatatactccatttgttgtagcaacagttccattaaatattcctatcttcattctcatcacctctattaatatattattacataaactttgtccttgccaatgttttccttggaataatatacttttatcctataaataaagtatttacaagatacaaaggagcacctttcatatgctcctttttagacgtaatatactgtaatgaaattaaagttcaataaaattctaatttttatagttatttatataacatacttaatttctttattttcgaacaagtcctctatttcttttataaagaattgtttcatttcatctatattttcttttggataaacgtactttccatatccaaattgaccatatttgaatttacgctcttcatcactcattggtaattcactttctggaaaaacctgaagtattatattttttgctgttgatgtataacgatgagatattatttcaaaggtcactggagtttttaaatcccttggcagatttttacttaagcttagcaataaatcatgatattcttctttccaatttggataaatgaacacaggtgcaactaaaaatccaattggatatcctgctttagccgcctttatactagcttctatccttaagtcacgagaagctgttgcatgctcatacttattaataactgatgatgtattaatgctaaatctcatttcagtatgaccattatgctctaaatccaatagtgaatctatatcgttatactttgtcacgaatctaaatctagcattctcatgcttaccaaaaaatacgatagccttttcaagtgaatgagtataaggttccactggtattggatctgatgtagctgcaccttcaaatatggttatttcaggcaacctttcatctatatacttctgagcttgacttaaaatctcatcaatatttacatgtaccttcacaaaaggtttatctccgagttttgtatttaaataacaatattcacattgccccatacaccctgatattagtggtaattgataatgagccgaaggcttacaagattgaaatttcagactcttctttgttccaaccactaaagtcttctttccttccctatactgagcataaaaatcttctccaggaatatgctgtttcaatttatttgaagtaatattgataatttcaacatcctttttatctttaaacttgtttaaaatatttttagctgcctcataatctaatgaatctttttcaaatataactcttttaggtataaacatattttttcaaaaaaccagcatatatacgctggttctttttctcctctctttatatttatattgtgtgtttgtttatataaagctagtatttgctaaaaattatattatatatacctaaatttacttttaattacttcatattcttttgtgttttataattgtttattctatccttaagctcgtttacattgggtttcctatctattgatattttttccttattatccaatttataaataacaggaactggctccccttcttttaagaactctaactctgcataacgaataactgttgttacttcccctaaaaatttacttccattctgctctaaaacatcaagctctaatttaacttcttccaattttcttgaatacttcttccctgtttctgttacctttctaataagtcccacacttttaactccattagccagagctctcttatatcttacttcccttgaaatcattgttacaattattatggctaaaggaataattaatgctaacattggaatcattaatggcaatccagcactaactcctctctcatttgttttagttaaaaaattctgcataataataaataagctaaaaccagtagctgccacaattaaaattgctgatagataatttttatcttgtttcatatttattctccctttttttatattttaatgtaaaattttaatgctatagatggataatatataatttagacttctgttgaaacataccaaaattataattatttttcttattttaagagttttaatttttcttattcaaacaaagaaatttaattctgccccgattgagtattcatatctaaatatgacttcatagagtcattgttaacgttaaactttttgcttttactactactttccacaaaataattgtagaatacttatttcaaattcattataacataaataataaacttaattaataaattaaatatgtaattatactgtatttttaccattggatagaattaatctaaaacttttgtatacattttcattttacaaaatccttttacataataagcattatttgtaaaataattaacattatgataatattatactgaaaataatcaattttagggggaaaacatagtgaaaaaatgggaagttgaagctgacggtataaaacatacaattgaatataaagtcggctttacaaaaaaaattattgtagacggtgagacttataaggtgaagtcttccaatgcatttatcaatttgatagattatgcaatttcttttggcgatacagactgtaggttagtagttattggggctaaagcggacttagctgttaatggaactttcttaggcagcaaaaagccatatgagccaataagcaacttaccggtatggatttatgtgcttgtaggcttgagtattttaggtggcatgttatttgcaggaattctaagccttattgttggtcttttaatgagtattttgtacattcaatttgggctcaaaaaaaagactggtcctgttattgcatgcttcattatttgtagtgcaattcaaggtctgattggatgctttcttgcatctttactatatttatactaaaggatatatttgtttatggaaaatgataataaaaatattgtaacaggaaaatcaacaaaagctgtagtaactaatcagattagtaaaaaaaatagtggcctagcagtagtttcgttagtattaggaattatgtctattatacttttttgggctttttcatatccaataattctaggtcttgctggtatggttatcggactcattagtatcgctaaaaaacgtgatggattaaaaatagcaattgctggtataatcacatctataataggcttattaattggcatcatttttgtagtactttatatattttacatattttaactcacaaataaatttcaagcataatatataaaactttaataatattaatatataaacttgcgccttcattattatgatgaaagttctacacaaagaccactgttctaaaatgacttagaacagtggtctttaaaattatatataaactttacttaagaatattttatattaattaaaagtttagttactgctaaaattcaactgtatttagcatattttctttaatctatccttcattattttcatcactcttttctctttatctttaaagatagatatgaaatcttactccaatccaattttataatagcatccatataagtaaaaaacaactttaaattactttaattggatggtataatgtactttgttaactactaaacttaaaatgataggggtaaaaaataatgaagaaaaaaagaataattggtttttttgtattggtggcgttactatttagttttttatttagtggatgctttgatagtaatgcagcaaaaaattcagctgacatttactgttcactaatatttaaatctgatgctaaagatcttcaaaagataggggtatctgactctgagaaagacaatatagtaaaagaatacgaagataaaattaaggatcaattaagaaaaaatgttcttttgatgcaatattcagcttcagatgaacaattaaattctatatgcgaagcatataaagaagcactttcaaagattacctatgaaacaaagcaaatttctaaatctggtgacgaagccgaggtagaaatttcaactactaattttgatataaaaaaaatcgatgaacaagcagcaatggatgctttagacgaaacggataaaatggaatttacaagtaatgaagaggaaaataaaaaatttggtgaaatatatttaaacaagcttgcagaaggattaaaaaatgcagaagtgagctctgataaatcttcaaatacatttaaatttaaaaaagttaatagatattggattgcagatgatcaaactaatttcggatacaagttagttgaattagcggtaaataaagataatcctaatcttaatattgatgaagaaagtatctcaccaaaagaaagtgctgaagttctttggaacttagtaattaaggaagatagtagcggcatggagaaacttggttacagcaaagcttttggcgaaagaataattaagaatataaataagaatgattttaaaacttttaagaaagaatctggacaatctggtatttcattgtcagatgatcaacttcaaggaatgataactgctctaagaagtgctataagtaaaaactcagttaattttgaagaagtgtctaaaacagataattctgcacaagttaaagtatcatcaacatttatagatagagatcaaatctctaaagatgctgtaaatattactacatctcaggcactatcaaatggtattagagataaacaaaaacttacagaagcttacgttgcaaacctaatagattcaattaataagggccaaataagctcaacaacaactgaaaatacattcagcttcaccaaagtcggaaatatatggttgccatcagatactactaattatactgaaagcatttctaaaatggtcatgaaataataaaatttattaagtcatatatcaagatttttaaatataaatagccctattcattagggctatttatattttttacatccattattttcatataataaaggaacacatattttttcaattaaaaatatatgctccttttattttttaactaatcaataccatgatatattttactctctattcttactacaataattataaaataaagttctttctgccatatattcctcatatagaacttaaatttctatatctatttgctcaccatttttgattttaactctaacatctaatattccttttcaatacttacttctttagattccaacatttacataaaattcagttttatatccttcaaagctttctagcatatcaaatttatgaatcatgttgtttattacttttattggcacgcttctagctctaattctattccttgaaataagttcgttatatggcacttcaatataaataaatttgactctagctccataggatgaaaataaatcacataacttctttctagtatcacttacaatatttgttgcatcccatacaaatggctcctttaatcgcaaataatcctttgctctatcttttgcaaacatggcaattttacttgaattatcccttggtgacacattaaattcttctcttatatcatctaaggaaatcacatgcatatggctcaaattttcttttatataagtatccttacctgcaagtggaagtccaaccattactacaacttcaaagcttgtgatatcaaacactttatcaccataccatatatttttagtgttgaaatatttaaacctcgtatattcatttctaaattcttttttagaataaaaacaccctatttcaatagaatattccctaaaatactctatcttatttaaaagctcttttttatccccacattctcttcctaacagatctacctttgacaaaagatataataaattcatatccaaacattcactggctttaattaaattatattctaaatcttctttctccataaagagtagtggcaagccatgatattttattaaggctgcaatttgttctctagtttgaaagtcaatttcatatttttgagcatattctatataaactagttctctaaacctctttgccccttttatggcatgctttggagatactatttctccatcttcaattttggtacaacttattttgcctatatcatggaacaaggcagctaaatataaaatcaccttttgcttattagaaagctccttccattcatttaacttcaaaagctcatcacacacatttttagtgtgaatataaacattcccttcaccatgatatttgggattttgaggtatttcaataagattatttataacttgaaagttatcagctatactttgaaaatcaaattgtttattaattatattttcaaataagtccatcttcatttcttacacctcttctcctagagaaaataaatctaacccctctttaagcttattaggaataatagttctattaatccaatgagtttcagaatctaatatagtattcaaaaaagagtttcttacatatttaaatctatctataacttcattttcactttcaaccttaatatataatccttccattaagtctgatgcatctgtttgcttttttacaacttcataagacaaatttaattcttcacattgctttttgagaacttcttggcagttttcagatttaaaattggatctacttaaaaacgaagttaactcttttaatttgttcacttttccttcatagagtactaaaactgaagtgataaatttatgtcctcgaagcatttcctttcttcttttagtacttaaaaatttattttccgacttatcgtagatatcaaattccataaaataatgagtgagttcatcatagaaaacagtgtgttttgcatatagccattccccatacattacatatctatttcctagtatgctttcaagttcatttttattagaattagcccacattttaaatagtgaaaactgcttttcaccatatcctccattaaaaaaatgacctctactctgcaaaagtagatttccactattgtcaaagctgattcctgtatttgctccatcaactttttcttctacaactatatatttatctttaataacttcaaatttaacactttttaaatcctcatcgccagcttgaagccttgatccatcaatgtggcgagttcttggatatttaaacattccgtccatattatctcttctttcttagtttatttatctgatatctagccattgtaacactcccaccttcttttaaattggagataacagtgacttaggccctaggcattgcacccctgatggtataagttcaacttagtattttcaatgagaaatttatattgaacatctacaatcacaaaatctctctctacaccaatatttttacaaaataaaaagtgctgcgaatttaacttttcacaacacaaataaactaaaaaagatattgcttttttagagaattaagcatttaaaagaaagtaatattaaaatatctcatcttataattgcctttgctatgttattgaaaagtatattctaattaggcacattcaaaaaataacaagtctatttgcttgtttatttttacgcgacttaaataagagcatcttaaaaagaagttttctttaatataaaaacttttatttaccatactttaataaagctcttaattttatatcaaatattcttgatataatcgactacctaataaaattagatataatctattagaatatacaccttacatagttctcttcctctcaaaattacaatttatataaatataacatcttaacatttatatgtcaaattaatccatatcgtaacttgttttggcttcttttataacttttaatatgatatacatttccatgcattttaacaatttgacaaaaatgaggttccatctatattgaaaattttcagaatttgatacacattttaaatctcaaaaggtaccactgatacaacgttccatgatttagacgctaaattgctgtgattaacataaacgctaaaaatacatctcttaataataatgttattaaaataaaattctactaccatttttcacttaatatttcctttctttttgcttcatattcttcttcacttataattccatcttctttaagacctttaatctttctcaacttttcatcaaagttcttatattttccttcatcagattcattatcttcaacatcaatctgaaatgatgcaactccattttcactaaaaacattgatagcattagccaatcctattccgatagctactagtgtccaaacaacaccaaatgcacctgtatctggtatagccttagttattccaatatacaccataccagctcccgcaaccatcccaataattgatatacttttatttggttttactcttcccctctttgacatattacatcctccttaaacaattttgtttagactttatacattttcacaactatattttgacttatcatttctagcttacgcaacacttattaatactacattattaaaatctaaattatctatatatcgtaaatatagccttttgtataattataaatatttttactaattttttccactgatcctataaatattttactaaaaaaaactcaatattaactgaaatattagtacctatatcttgaaatatatctattacagagttattctcatcttttaaaagtaatgaaatgtttgaatcttcatctgctccttcaacataattatcaattccaaattcataaagtatttttcctcatattctacttctttacataataaaagagcatatatttctccaacttgaaatatacactccttcatttattacaacatttaaccaataacttatcatactatccttatttttattaatttaattctcccttaatttttaaaacctcatcaacacttaaccctgttcccttagcaaccatctcaacatctaatcccataaccaaaaaattcttagcattttttattgtagcttcttttatcccttcttctctagcacttttaagtcttgtcatttgatcatgaagttctgcttctcttgcttcatatgctgctcttgcattatcatctttacttataacttcaagaatattatatgctttttttattttttcgtttttttctgctaacatttcaaacgcctccttatttcttgactgtaagaacatcatccattgaaccagtggttcagattcatcttttggaatattgttatcaaacaatttgggtaattctaaataatgaatctctaatacatctgttaactttttatttgtttcatcttctgtaatatgaaaacttgtatgaagtttatttatttctatacaattaaaatcaactatatttattgttatacatttctttagtttatcatatgtatatcctgattttatctgaccattatacattttactccaataaaataatgttctttcagccatgtaataggtatataaaacttggatttctatatctatatgctcaccacttttagtttttgctctaacatctagaattccttttctatcttcagcaaactctcttaatagttctgtattaattagctctatatcttctaattcatcatgtggcatttttaatattgaatttaataattctattattaaatctttatttttctcatctccaaataataatttaaagacaaaatcatttttaggtgaaattatcaaaccttatttcagttaatagcttaacaaaaataaggtttgatttatagttaaaattctccgaatttgatacactttttaaattgctaaaaatactactgatttcaatagttttatgatttagaagctaaacttctgttcccatctattttacttagaattcttccataagaatcatatgtgaatctttgagtcttccaatttccaactgaaatctttgttttcttttctaataaattaccttggctgtcatatatttttcaatttttgtcttacaatatgtgtttctaaatcagctaaccttgttggtattggaattctactatccatgctcagcaaatttaatattatatctgtacttgtatccaaatcgatataatttccacatgaaataaatattggtttggtattttttctgcttcttaatgctcttccataaacttcattatctattactatatcactatatgcacctacttcatctttaggcatttcaaagtcacttcctttaattttaagataactttttgctacacctattgttgggctgttcaagaaaaatgatgcgtgtgttgcaactcccatatgattaaagtgtaaatatccgttcccatcaaacataaagatattaggctcagtttctagtttttcaacagcttttataattaaaggtaattccctaaaggctagatatcctggtatatatggctcattaatctttccatagctgtacactttttcaattacttccttggaaatataattaattactactatacaacatgctgcatattctttttcttcttccatccaatatgcaagatctactcctgcacatgtttctatatgcttagaattaaaactattttttagtataatattttttgctagatcactttgaatactagaaaattcttcttcggtatttatattaaaatcatgaactagattaatattcattttatttattcctgccttatatatttattcttttgcaaaactttaatcctattttttagtaattttaattccttgtaatcttatttatttagtgttaatcccatcctgtctctccatattatctctacttgcaagattcttatatacttctttaactacttcattttcaaagactctactcaactctgctttatataaaaatatgcctcaaattaggctatctctttttcatgatgatgctagttttctttaaatttaaacctgaaatcttttgaatttccttatacttcttatacttttctatttcttctagattaaaaatatttttcaacatattaacattcactataattaaacatagtaattttcctttgtaatgcttattcttaaaattaaaatatttagaactattatcatattatacatttaattaaccacctgatataaaaattgtgtcatcttgcaaatgacacaacctatttatatcagattttcttcattccacaaaaaatccaaaaccatttactatggcaatgcttatctaaaaaatttatataataaactgattttctacaactatttgaacttttaatctattctgtattactatacattaattttcatttatcacgtcatataaccagccattcacttttttcaatcagcttattcattcgccttatatcatctcctgtaggttcttttttctcatcgattaaatttccattttcatcccatattttatattccaaacaaacatcaccatcatatttccccatacattttaatattccattttcataaaattctctagcttcatcctttcccatatctcttctaaaattattccatgatcttacttttccatttccgtaaaactccacctgatccccatcctcgtatccatctttataaaaacaatacgatgccatatcaccatcattatattttgaatatactattccagtatatggtatatcagtatccattattacgtgagttccatatactatatcataccctatttcttcactatctttaccatattcataaacatattcttttgataatattttcattcttttattccccctttatttatcaaatactaaattcggaaagttattcttataatgttccgtttcttgctcaataatttctggtaatacatccgcctctaatgtaacatatttgcaatgaggacaccttggcattggacttccaggtgtagcaagattcctattatttagtttccatgaattaacgacatttattattgtatcattaggcttttgattaaatattcctggatttttttcatataaatcatccactaaactctgagtaatctattctcgatttatatggttttttatacaaaattcatcaagcattgattcatttaatgaaagacattctgcatgtgtacctgctccattagtgaatttctcatatgatttaaatatttcatcctcatccattttaagtttattaattctttccttggtatatggatggtatactgtttccatgttctttacttgatctttcgttaaatttgtaaagtgataatatttatctgtatttacattatacgatgtggataatgcaggtttaatatcgttctttaccaaactgtcctttttatcatttactctatcagtcaattcatcaatctttctttgagtttctgatctaacattttcataaattttagttctgtcacttcctaagttcaatctttcattattcaaagcttaagccttatttttacaatccatatacccactagggtcataataagctacaggattattcccacaataagcataaagatttaacccatcgcctctataaatatcttcctgagtaaacctaccaataacaggattatagaatctagctcttaaataatattgccctgttattccatcaaattgttgtcctgcataggttattctattatgaacttgttcttgtgattccagaacattaccaaatgcatcataatggtattcatttttgatattctgatatttatcagcaataaacgttgtactaccatgttcatctacagtatagtaatacctatttaatttagattctatttctgaatcttcacctaaatctgcaatatcagcagcaacaatctcatatcctctagtaaatctagaaatagcattccaatctttatcagcctcaactaaaacattctccttatggaaaataaacttagttagcttttcattttcttcaatctcagctcttaatccttctgtatcatatctactaactaaagtattttcttctttagttatagcttttacttatttattgagagcattatacttgaaataactttatcatttacgttaattgttaaatagttatgaatccgctcatcaatgcttttacaaatccactagttggcctttcaaaatatgtaatataatcatataatcattcaaaaaaactatatacagattcgtttttatacaaatctgtatatagtcttaatttatgcacctatattaccttaaatactcattgaatcaacatagaacatttccgcactaccatcaccaaaaataacaaatcctcctgatggattaaaccaatcgcatatacatgttatttcgattctatctttttgaaccttaagtctttttaattctaatgaactaagcttttcttctcgtgttttagcttcaaacactctttttgctttttccttgccaactatttcagcaaaactctcttcattttcatcttctagaagttcttctctttttcgtaatgcagcttcttcaatgttataacaaatcttatcaatatcatctattagatgttttttataaaattctttttgctctttttttatcttttctgcttcatccgcgttaagaagctgtgggttttttttatgaaattgcatcagtccttcgctcaataactccatattaaatttttcgtacaatgaattatatatatctacctctgttttgacctcgatttctttattatttattctaaattttattccatcttttaataaccaatacccctcttctttataagtaatttttccatacacatcatcatcgaatgttttttttgccattatatacaactcctttacttgctcttacacatacttttttctaattcttgtcttttggcctctgatgttccacctaaatgtccaaattgatgatttatatcagtatccacccactgtgttttattctttttcatttcttttactaaattttcttcgtggatagtctgaccaaattctttttgtttatcttttagtatttcatttattgcctcaattctttcattttcagttaactccttgtttcctgcatatatttcagttgacttaataatattttttgcaatatcctgagatctttgtgaaccactagcaattcccattacattgtcattatacatcttagtataatctccattatgtttaacaatcgttctagcaatttcgttattagtatttggatgagttatccgtctctttgaagacacctctacatctactgtaaatactgaaaaataatcaaaatcaacttgcccatccttatatggcacgtaagttgcattatgtgctttcattattgattctacactattatgaaagtctgttttatctgtattttgaaatacaaaattagaatttcctttatcgcctgtccaataaccatacttcgctttttttcctggtacttgcctcattcgctttgcaatatctttcagagaatcatattgtaaattatctaaaaatgcatagccactaggatcatagtatctaacaggattgttcccacaatatgcataaagatttaatccatctccacgataaatatcctcttgagcaaacctgccaattaaaggattataaaacctagctctcaaataatactgcttagttatgctgtcatattgctgtccagtataagtcaccctattatgaacttgttcattgcttccaagaacattacaaaatggatcataataatactcattttttacatttctatacttatcagtaattaatactgtgcttccttgttcatctgtggtgtaatagtatctgcctatattggaactgaatttagaatctgaatatttgcttgcttctacaatatcagcagcaacaacctcataacctcttgtgaacctagagattgcattaaagtccttatcagcctcaactaaaacattctctttatggaaaataaactttgttaacttttcattttcttcaatttcagctcttaacccttctgtatcatacctacttactaaagtatttccttctttagttatagccttaacttgttgatttaaagaattatactcaaagatattatttccattttgagtttcttcttttattgtatttccttgtttatcatatgtaaagtggtttattccagaattgttgtgtaattcctttaattggttctttacattataaacatacttttcagtgatatcatttgttgttttagttaatctatttcctactttatcataagtaaagctttcacatcgatcatcatatcttgaatcaacaagtctgttcattgaatcatagctatagaaattcttatgctttgaacttactttttgaagtctgtttccatttaaatcgtacgcataattataatctactaaaacttcaccatttgatgatatagtaactaaactttgaacattgccatcaccatcataagtataatctgtctttaagccatttcctaatcttactgattttatactatcatttttattatagtcatagatagcaaggttattttgcttatcatcttgaattaatttaactctatcagcatcatcatagctgtaaatactgctctttcctgtgatatctttaatagtttttatattgttatttttatcataagtgtactttagaagagttcttcctgaagcactcttagattcaagcattccttcaatactataagagtactcgtactgcatatttcctgtatatgcactctttaagcttccatctgggttgtatttaaacctttggtctattacgtttaatttatttttatttggatcttcttccttttcaaccttagataattgatgttcttctatgtcttctctttcttttttgtctttgattctttctgtaaagcttcttcttcgaggggcttgatttaaagacacgccatagaagttttcttctgctttctttttagcttcttccatagctttttctctggcttcttcagcttttcttgcttctaaggcgatttcttcttgatcttttatttcacaaacttggcctaagctattgtaaatatattctatagttccaccattggcatctgttgtacttgttatatttcctgcatagtcataagtgtacttttcacttccgccttctggtgttgttatttgaataattctcccccaatcatctaaaagatagcttgtttcatttccattaccatcagttattcctgtaatgtttcctctggcatcatacttatagctttgagctgatttgttttcttttctagaattcggagtaactatatccttaatttgacctaataaagtataagtgtattcaactttattattttctccatctactctagttttaagattacctttagggtcataagtattttttgttactgtttcacctaaagcatttttaacttctataacttgtccttttaagttataggaataagttgttccaactccatcatctttctcattatcatattgttctggaagtacttgttttattattctatcgtttttatcatagaataatcttgttatattacctgagaaatttataaaatgagtaagtctgttttgagaatcgtaagtatatgcctttttcttttgttcttccttaaatccaatcttctcaaataatttctcattttcttttctattttcatatctctcagaccaatgaaccatgtagttattttcactagtatatttattacttataagctttgcttcttctccagaatattcgcttatgctgattatattatctgttttatcataattataaacataacttctaaagattccattagcttcatctttttcatgctgctctatgactctatcagctttatcataaactctccctatttcatagccttttggagttgttatttttgttatatttccgtttttatcatattcataacttgttattgcccagacatttctgccctttgtttctggtgatacaaaacctccatttatttcttctttcttttgagttaggtttcctaccttatcataaatataatgaattgctttagttgttgtatcattaatcttaaagctctcataggtctttttatttaagcagtcatatttatatcttgcttttgctccatatttgtctttaacttcaatgagcctgttttcttcatcatattcaaagtaaatttcatgataataattacagatttcattttctgagactaagtttataccatgtctctctaagattttattgctatttttatcataagcgtagcaagtcaaattatatttaacattaccaatgttatctttttctgctggaactctcttttcaattaggtttcctgctaaatcatacttaaataatgtagaatttccttcaacatctacttccttaataatatttccatgtaagtcatattcaaatcttttttcaactacaccatcttcatttattatagaactcaatctattcgtagaatcataagtatagctgtatccaagaccatcatcagtttcttcattgtaatattctgggcttatgtgcttaatgacatttccattactatcatagaagaatctttctattcctccatctgggtagatagtttttatttttctattatccttatcataagcatattctactccaattccatcataggtttcaggattataataattcggatttatttcttttattatgtttccttcgctgtctcttatatttttttctataattccaattggattttttatgcttataagtctatccatatggtcataggtgtatttataaccttcatcagaaatgcttccttttatacatgcatttggcgtataaaggcttgttaaatttcccatattatcgtaattctttattgttacatttccattggcatctttaatacttgcaacaaagtttaagttattataaccaaattctattgttccataatctgtagttatttcagtatttctgcccactttatcataagtgtattcatactcatatccactacttgtaattactcttactggatcttttccttgttttccttctaagctgcttgcgttttcatattcatattttgatgtatttccattcccatcagttttacttagaattcttccataggaatcatatgtgaatctttcagtaatccaatttgctgctgaaagctttgttttcttttccaataaattaccttggctatcataagtatagataatttctttatcttcattatctgtttcttttattaagtttccattttcatcataagtgtagtctgtaactaatccatttggtaaagtttcttttaataagttaccgaactcatcatagaccttatgagtctcaaatccatttctatcttttatataaatcttgttttgataatcatcatacttgtattcttctgtagttccatcttcatagaataaatgtgttattaacccctctttattaaaccttgttctttctgtcctttgactcttagtatagtagaatgttacttctttttctgaatcatcataagctattttgcaggtatcatcatttgggaagtcctgacgaattactcttccttttttatcaaagaagttcttagtataagtatgtccattttggtctgttatactgcttatatatcctttatcatcataggtatatcttgttattccctggtcaacatggataacatctttcaaataatctccatcatatttgtattgaactgttcttccaagctcatcttttatttcaattacttttccatctttataggtaaagaataatttataatttgagaaggttgttaaagtttcaatattatctcctatataagttaatgaaagcttatttccatgtttgtcagttatatttattaatttcccagaactattgtatttataagttttcttatcaagtgaagttttaaatatccaataatccttgtcttgttttaaggaataaatcttagctccacctttatcatttacccactcatcatcacttaaataaaagctttcaatgtgtccatctgggcaaagtacatttattttttccccttcaactccaaggcaagtttcaaaatttgtagtccagccaaggcccaaaagccctattctattatttacagattcatactttctttctattttaaattcttcatgaatatctggaagaactatatctgttgctggaatatacaaacttcctgttgctccatctacagggtcagagaaacataatttattactaacatattttcttattaaagtagatgttagatttgcatctccagttgtagccaattggcctcccatatctactgccacatctgttgctattctcagcttactcatggttggacatcctagctctaagcctttcccaattttttctactcctttaaatgcagttgtacctccaccgcttaagccacaacttaaagcaaaggactctgcatagctttcccatccattatcaatttttccatcatccgcataatctgcaattaattcaaatcctgtattcatagctgaatcaagccctatttttcctaaggtttgagtcatagcctctatagttgctccacctgtcaaaattgcagtgcttattcctgcaatcataactgatccatattttacaacattataaagagtttcatttcctccacacacagtgtccctcataaaattataggattttgaataatctccactttgagccttgctataatctgacaaaccttcactggtttcagatgcacctactgccatagccgtaacaccagatgccaccgcagctccagcaacagcaagagctaatcctccagttgcaactgtagctgctgcaagtacagcaattccaactccaactgccactgctccaataactgaagcaactactccaaaaccaattttactcttagcttcatcaacctttgcttccatattagctttagcctgattattaatttcctctatcgcctctgcatctccgtcatttctatgagctatttcatctggtagctctactggatctttagcacttccttcatattttatggtagatccctttaaaaatgtggcatcttccatttgaattccaataccgcctttagctatttctattttgctcttagcagaaatatttatattttgtggcctaaacggaggtgcatctccacttccatctctaataccgagttctaaattttcagttgctgtaagatttatattttgcccgttaagagatacatctcccgattgggctaagtttaaacttacacctccgccacctggtgaaaaattcatatcacttggagtcagcttcatttcacttcctcctgtatgagaaaatgacttaatatctggattttgtgttcttgcagagccttctccaattcttactgcatgaactgcaatagcttctttctcatcattggttggaaaataaatatgcacctggctttctttttctggcatgcagtaccaagcactgctttctattgcataagtaaaatatttttgatttgcgcactcttcatattcttgatctatttcaaagtgaactttcatagtattcccctgtacgtctttaactgttgcaggaatactcattccaaaaatcttatgatttaccatatagctagttctaagtcctctttcaagacctaatgtgtatattgttctgatttcttctttatagacctcagtatgaattttctctactacacattcaatttgattgaataaaactttctcaccaagtattaatttaattgggcttgcaatatcccatgttgtatattcttgaagataattttcttcaaacccaatagcttcacgcttattgaaattatcaatatcttttactacttcataatcatctatattaattttattattattgtttaaatctggtattccaaagtgaaatcttccatactcttctgtggtttcagcaagtaatacaccattaaaatgacttgctaacctctttaaaaattcccaatcagtttcctcatactgaagaataaattccccaatagtctttccatttgttatattgtctgtaaaagccttatcagcataagcatctaaaacctttgttataacttcctgataagtcatatctaaattacagaaggttctgctatttttcttaatatcaaaatcctttgtataagacacagcccctaattccataacatgaacactgccttcataagacataaaaacttcatttatctttcctacaaataacttaatttcttcaccagtatcttcaattctcgatacagttattttctcatcacttacatttttatttaaatattctattatttttccttcttctattaacaatttaatctttaaatatgcatggtcatttataggctgtaatatatctatgtcttctatttgaattgcttcataaggtatttctacttttaaactcttatatgtcagtatcatttaattccctccttttcatttataaagtgaaacttagcttcaggaagagtttaatcttcctctgaagattagctgaacttataccctcagggggcacaatgtctagagccgtttcactgttatctcccactttaataaaagatgggagtgttacagtagctagacatcagattaaaatccaattttctcctattctctctgtccacttgtatataatttgatttctccaccatatgcacactgaagtgtacacttccctaacaacgctggttttccatcaacaagaacatcttctttcccatctatccattcagtcgctatcattggagtacatacacctacacattgagctagtaaatcttttcctatatcttcagctggtggttttgaaaagaagtccataactttttctgtgaaacttttaggcctatttttaatctcatccgctatttttttagcatttgcttgtacacttggattttgtggactattacatattccaaaacttcttatatttatttccggtttgctatctcctatatttaattgtggaattccatgtataaattctccatgaccagttggaactaccacataactttcatgaagtgcacagctgcaggtaatagctgccgtatgcactatatagcttttttgaagatcttttattctctgtgcttcagcttcagcagcttttgcttcatctgctttcttctgttcctcagccgctttagcttcttctgccgcttgcttctccttttccttctcagccgctttttcttctggagatagattaagccatttccattcgtttgtagcatctctctttaaaaaacctccaactctctcagccatagtaccaatttgctttactgtatttactgtatctttggcacctttttcagcttcatttattgctgttccagctataacaccatatttctcttcattttcgcttgccatttttatttcacctcaacttcctcaaatttaattcctacaaatagccctctttttagcatgctttcaactacatcaagagaaactataaagtaataatctacaccagctttaatttgaaatatattgtaatcacctattttatcagcatctaaaactatcttatcaatccaaccatttttaaagaaaatagctttatcacttaatgcatctagtaattctggcagcactaatctatatactttctgtttcttcctttctaaatctgaaaatactgctattttataaactacagtgttttcatataatttaaaaagtttatgaagatcatctgaaattagtaatacaggtgcttgtattaaatctggataaatgctattctcgtttccgtggacaggtacattggtggaatccttatatttgccctcatctgccttaagcaatgtcattttttgactattattaaaaccttctattttaattgcattttctaaatttctatcctgctttaaaatgaaatacttcatatttcttcgcctccatctatatatatagtttggagctgctctgatgttaaattaataaacggtatatccttagcactaaatattgcatcttctaagtctgctccttcaaaagacacatttttaagctttgcatttatgaaattagagtttttgagatttgaatttgaaaaatctacatatctaagatccgcttttctaaaatccactcctgtgcaatccccactactaaaatcagaatcttcaattttagaattttcaaaagaacttcctattaatcggcattttttaaatatacattttcttatttctgtatctttaaactgacctcttattatgtcactttctgataaattgatatttttaagcttacttcccttaaaactaataaataacatattttgttttgttaaatcaccatcttctaaggtgctatctttccagacagtatatacaaaaggtaacttttctttaggctgctttttaaattctaaaagttcttttatattcttttctctgttatccatggcaaatagagtttcacttcttccttgatattcactccactttactaaataaaagtcctctaatgaactttccttaatccacttttcttcatctaaattccaaaaccaattccttactgtctttgacatatccttataacatttcactacagattcaaacattattttttgaatgtcatagtcattaactttacccatataaattcttttttctttaattaacttttccttaaaggtgataaatgtttcaaataaaaatcttaaatctatttcttcgtatatggatttagtatctaaataccaagatgagttgtatccatgaattaatatcttataggattcatttaaaatattaattctaagaagctcaaattggaaaactgctattttcttttcttctttaatctcatttgccttgctaattaagcttttcattccgtttattattatctctttaactttttcttcatcatccttaaattttttttcaaaaactgatatactttcttcttctaaggttttaactactttttctttaaattcttttaatgactcttccctattcataaaatcccttctttcttactaggacttatacctcttagcttatatacctaaaagtaaataaaaacttaattattatttactttagtacctttttcttttatgtttcctgaatcatcaaactctagacctccacctttatcacaagcaaaatttatcccttgctttgcacttactaaaaagcttttttgagcttgaattttgatgttttgctcggcactaatatttatattattttgacttgttatactaagggttccatcactagtaagactcatatctgcctgtccgctgtcacaggaaataaaaataccacttgatgtaagctttacctgtttatcatgagctgttcttaagtatttgtcatcaggatttcccattctatcttctgcctcacctgctccttgctgatagctgcttaccgcactaactgcaaaagcctcatcttcatcttttgttgggaaatacactcttacactatctcctatttcaggcatacaataccatccactgccgtcacttgatgctgacatagtagaaaatttaaaccaataagctgttccttgatcttgcatttcgtctatttctaaatgaacttttactttatcagcttgaactcctatgatttttccttcaattgaacttcctataatttttgtattaaaaattctttcctgtcttaaaccattttttattcttagcttataagtatttgttaatattccatttttcatttcatagattcccttaaaaatgtaaaaattctgttcttgaaactctatattatctccaagctttaatacttcataattatttatttcataagttaaataatctatctcattggcatcttgtagataatttttaagcatatatttatattcatctaaatctttgtgtattttataatttatattttctgattttaattctttatgctgatctggtatagacatcacaaattgtatttccttactatccataactggaaataatccttgattatatttagatgctattctttttaaaaactcccagtcagtttcttcatattgtataagtaattcttttatttcctcatcaggtatgtttaaaatataattagattcactataattcttcattatagaatctataagaccatgaacggttatggatgtgttttgaaaagatttggattttaactttatgtccattagataagacatgctttttgcttcaatacttaaagtgtatacatcaagttctacatttatttttatatctgtaacaatgccataaaataatgttatattttcattttccccataacaaacttctatggttttattattagttgttgaagtaatatcactatccttaatttcattttttaatattcctgtcagtttcaaaacagcatgcttatttatatcagtttctatttttaagctttttattgtttctaaactatagccattaacttttatttcctcatagccaatagctttaatgatttgactttctcccactttaattccctccttttgagctttattccatgttaatttaacttggacttatttttatcaaatctaaactataactaaattgtagctttacctaattttcatgagcatcatacttgccttcattataagctcccaagtctttatatctctttcgaagcaattataatttccaattatcaatgttcctttatgctctctataaaaaatcaaattgtaaatatttcctcgtcctgtaggtgtcttataagttccataaaatatttttgaatgaccttcacctaattctccttcttccatccattctagataaagatccatatctttaaaattcttttccatgcctttcttaaacttagtaaaactttgcttttgagctcctttatctacataagctaaagtaaaactcactccatcattatcatttactaaggtagtatttttgtcagtacttactctttcttcaagatatgccagtggcattggaatttctaacttctcacttaaaaatatttttctttcaaatttaaagttagtattatttatatttaaagagccttcatctacttgtttcattacttcttcaatagtaagcttttcttcctctgaaattaaattttcttcttcagattcttttctttgctgcttttccttttcaagcctttgctgcatttttaattttgctattttttcatctatattatccatagttaatgcctcctttttttaataattcttcttaaatttttaattttcaaatttcaaaactttctgtttctatccattgttttgaactctagttccatttactaatatctcatccccctctgataatataaggttacttcctgattcagataaaatatctacgctttgtgcagcgctgattgtcatttcattttcggctcttaaagaaaggttatttgcgcaagcaatatttatattcttctgacctacaacatctacagttccgtcattgtttaaatttacagatgcttgtcccccactgcacgctataactactccatttggagtaaacttaacttcctgtccagaactagtttgcaaagatttattatcaggatttgacattctatcattctctgcttctgctccggattttcccttattagttcctattgcatttactacaaatgctttgctttcatcttttgttggacaatttaatcttattttttctccaacttcaggcatacaataccagcctccaccatcaggcgatgctgcaaccgtagcatattgaaaccaatatgaagtagatatgtcagtattgctactaatctcaagttgaacttttaccttatctctttgaacttccagtattgatccattaattgaaattcctactacattcatattatataagcgctttgatctaagaccaccttttgatcttaattcatatatattttctaaattaccgccttccattgaatacgttgctttgcttatataaaattgtctaccattaaaatcaaaattttctccaagatttaatatttcttgtgttcttattttataagtaataaaatctgtttctaatacttcgggtgcgtcattatttttcacatcattatattcttcaactgctttagaaacagtgtaattaataatttttgtttttggctccacatgtatttctggtgcgccaaaatataagtgaatatccttaagttccatttcacttataagactctcattatacctggacactatacgctttagaaattcataatcggtttcattatattgaagtataaattcaccgattggctcattaggaatattgatggtataatttgcattaggatatgatttcataacctcatctataagttcatgcgtagtcatatttatattttgaaaatctctttttttcttctcgatatccattgtataatcaagacttttagcctcaataaacaatgtataaacataattaataacactgatttttatgttagttataatgccattaaataaagagaaatgtgaaccttccttttcataaaatacttctattggtgtcctctcatctgtgctctgaacacagctgtccctcatttcatcatctagtatacacgtaagacttaatgccacatggttatttaagcaattttgtatatacatctcttttatagatttcacttcataagtggatattcttaaattttcatatgatataaaatcatctttcataaatacatacttcctcctctttttattttaattattattacttttgcagtttgtataaaaatgtttgttaaattttttaatatattataacttatagttaacttggattatttttaatattagttaacttataatttttatttgaatgatatgtcgtaacatttattttttaacaccccaaggcagatgatttttaatttatcatctgccttcttcatttgtatattcatctttacttatacttaaaaattcctgtctatgttagaagttcatttgcggtttactccataatatatatggataattcatctatctgtatataccaacaactttcaataaaaacattagtagctaagtagttgaaattaatatcgcaaatatttttacataaatatctttttttgcagcaaaaatagcatgatatataaacgctattaatattccaaatactagaaaatatttaattgtgccaatcattctatccaactctcttttcaaaattctgccattttgtaaaaatacgttctcaaaacataattttcagaataaaacctagaaattttttaattttttctattagcataatctatttgggctagagcattttctacaaatgaatctttaaattcaaaaatatcttttgaatttattgtattgaatattaatttttttgttgtcaacttgttgcttttgatcttggggactgcacataaattgcttatcctgcaatttaattttatttattttccttatatgaaataataacttcagctattaggaagaataacattaaggcagcaaaacttccactctctaaatatatatctagtgttttatattccttgtgcaattgaggataacattccattattatgtatcccactgaaagagcactacctgctactaataataatatgactccaactatacttaatttatttcccaatttttttagttgcactgtacatataaactgctaatatagtgcatagcactataagtattatcccttgaattataactgccatgttgctatttcccattaatttaaaaatcacttgtatgactaaatgcagacacagctattatccccatatctttgcttgtattcttattcatacatactacctcaccttcaatattagtgaccttgagcatgtctctaatagcattaaccagttgtaactctgcgtaccactacaaaatagttctataaattcattatttttaatcacaaaatttaattcattgaaacttttaattctaagccaaaaccctagaaagacaattgttacaacctttactgtgccatacgtagaattctttccttaatttgttaacttatttaatccattttcaatatgataaacagtcttcatgtattttactaatttagtaaagcaattttttcaattatgagacctcatttcgtttgttagtttgacaaaaatgaggttttataatgaaaattttcataacttgatacacttttaaaattactgctgatatcaataatgtatcatttagagtctacatcactatttatattaatctctattcataactacataatagatttaatattataccttagtaaactccataaatatttttacaattagattaataataatttttttgttatttcttaatattattcttcatatatcttaacaacattaaatccattattttgaatttctttttcttttatatgcttatcaagatgcatacaataaaccttatttctaagttcttgtggaattatctcacagagtcttctcaatgataaatgactatttccttcatagtctaatccacacgtatcttgatatatcctataaatttgtccgtttttcagtttctctagtgctattttacttatgtcattagcatcaccgctgtaataaaatactcttccatttaatcttatagtaaatccatatgctggtattgtatcaacatgagaaactggtaaaaattctatgctgaactctccaatttgtgcatcattcaccgctattctctcaaaactattaagcttatacatttcagcacttatacctatactagtaagaaacccttcaattagttgttttttaggaaagaaaatagttaccctacgttttaaaatataatatgaataaaatattacctccccaaggcttccaacatgatcaggatgtgtatgagttatgataatatataaattttcaagtccatccagcaaatttagttcttgcaacctatgaaaaacagtccctccacaatcaataagaagcaaactattatccctttttaaaaaagcacttgtatttcctttttccgtattaaaagcactccctattccaacaaatttaaacatttcctctcactttctcctaaatatatactaggtaaataaaaaagttatattatattctataacacatataattaagttgtatatatacgtaaaaacttatttttaaactctgaatttttgctaaatcttaaaagccattgaaaaatatcaatatcctcttctctagaccatgcatcaaaatcactaaaaggttttttatattctaactctatcgctttttttccattaatatatgccgtaaacttccctttgagtccctcttccgactgctgaataaaatcaaaatcatcatttgtgattacatattgctcactatccaaaaacagaactggtccttccttactcccaactaatcccataaacttaactgtactatccaatatttcagagtatattccttttgacataattataccatctttttttatcatttcctcaaatatgccattacacaaatcacatttacacactttgttatatttcattatattcataatatattttatatctgacatatacttacctcctattgattcttcttaataagccactccttaaagttttgcaatagtttatcaacattaccatttggtctttgagatgatttaataatagcttcatagacttcatccatgttttcacattgtgaactatacttattaactaaaaagtcaaatgatgctcctagttcatctccatatcgttccatattaacttcatatatatattccctaagagcgtctggtgtcaaattcttatattttacccctaaatctcttcttgctttataaagtgtttctgcaatctctttctgacttagtccttgagctctaagttctgcttcataattacataagttcttaacagcattctcatattcttgccttaatggatgatttttgattgagccacctatttcttctattaactcatctatttgattcatagaaagttttccagctttagccgccccattagatactgcttcactagcaactatttttgctgaattacttccaataatatcagctgctcctgacatgccaagtgttgcatttgcctgatcgtccatttcacgctcaaataacttatcaagttcatctgcacttaattcacttacatcctcgccttgttctgacatatataatagtttattttgaaatgcagcaactgatatcgtagaatatctcggatcatctgcatacttttttcctggtattattgtatcataccactttgtaaaagctatatctacatttttatcccctgtatcacaagccattaatgtatccgtttcaccatcactgttctccagagaatcatcttctgccttataatcctttatccatttaccattatcatctacataatattcattaatccaggtagcatgtgccatagacccaccgccatataaatagtaccagtaacctttatctttcaaccaaccatttaccactttatcatccttaagaaaataccagtcattatctatatatctccaaccagtccccgtaaccattttaccgccattatacacaagatatcctttaacttctgtatcgctagccatagatccttgtggatacaaatagtaccaaccttcaccatcatttatccaaccagttgccatttctccatctgaatgtaaataataccagaagccatttacttttctccagccagttgccattttcccatcatcatccatgtaataccagctatcaccatactttacccagccagttttcatttccccatcagaataataataatcttctcctgaatagttatcttttaaccatcctgtgccactaactatttttccatcattatctatatcaaaaccattaattgtattattataagtcatagaaccgcctggataattaaaatagtaaaagtcatttcctatcttattccatcctgttacgtttctttcatgagcccaacataataccaagtaccgctcttgtcctcttcagtatttacccatctctcatccttcacctgtcttccatctggacctaaatacttcccatcaacttccttgctccatcccattgagccacctggcttattaaaatagtatgtactaccttttatatctttccaacctgtagtaacttcaccatcttcataataataccaggtaccactattatcatcttcagtatttacccatccatcttgagtatcacacattataatccacctcccctcattcttcaaaagaagcataggtttctctgctgcttccattcattattacattgtttcctttaatgtagaaatcaccttctattgaaactttatgtgctccatttcttttcattagtaatatctgattttgggcttttatttttactctcttttgtgttttgattgttatttctccatcagcatttaatcctaatttctttgggcttttaatatgaattccttttttatcatcaaaacttatacttatattttttctacttccactctttatgcttaatgtatctggaagcattgctatttcatttccactttcagtctgaaagtatctattggctggctctgctgtttgtgtgcagttgtctccatttttttttacgcagcctgtgactattggattttcagtttcttcatttgggaaataaagtcttgcactttctccaactagaggcattgaatacattatgtttactgatggcggtgcgtaatcaaaccaatgagctgtacctttatcttgactttcatctatatttaaatgaagcttcaccttctcattcttaacatcgataacttttccttctaacgttagtccttttatacttttattgtaaattatactttgccatactcctttgtctctgcatagcctgtacttataaaatatatcttccttattcttataagcttcgtattcccttatatataaatccttctgtctatagttaatttttgcacctatttcatagatatcctttttctctagttcataatagaaataatctgtatcattatagcctgagtcctgcccgcctgcttcgtaaaagctcttaatatctttgtaaacatcatattctatattatcatctaattcgtagttctgattatgagaaattccaaagctaaacatacaatttaaatttattatgtcacagtatagttctgaatttaattcactggctattctctttagaaattcccagtcactttctttatattgaaatagtggtttatctatttttttaccctttcctacattttgattgaaggaaaagcctgaataatcctctaatatttcctttataagatcatcataggtcattttaacattttgaaatgatctgctctttttctttatatccagttttgaacttgaggttaaagcttgaatctccaaataataaacagaatttacattggttgttttaactttttgaactattctataaaacaatcttatactattaccttcgttaacttcatttatatcaactgtttctttatcttttgtatctttttcttcataaacacatatttcatcttctgcagaggcttttataacagaatcaaaatttatactttcatctattaaacattttaaatatagatacccatgcttattaggcttattttcaatttttatatctgttattttcataatatattctgtaacaaaaagcagatgatttttaatttaccatctgccttcttcattctgcatatttattttttatttataactataaaactcaacttttcaaatatgaaccattaaaacacaaagtgttgaaattgttcaatgaatataaaaccttttatttgattttttcttattatcctcaatctaaactaatgctttttgatatttagattcaaaattatttaatattaaaaagttctaaacatttatgactcactcttatatttatttaacaaacttctgctatattcctttatatctttctttgaatatatagagcacttattaatacgtaattcattttcattaaaatcatcattttcatatctttttaaaatatttattgtttcagtatcaccgcattttactaagaattctgctacatcatgcgccaattcccaattttttaaaaataattctttagcaactgggatcaggaacttgaaatcatcaatatttaaatttttaaattcattaatttctacttttctgaaacaatcctcttcattaactttataaacaatgaaatctgaaactaaataacatcgtaatttattacttctataaagacatacaatattcttatttaaatcttctacatgcgttaagctaagaatttgtttgttatttccttgagcgttagcatcatataattcaaaatcgtattgactgtcaggataattcgtagtaactctttccttaactaaaaatctatcttgatattcagtagtgatagtatatgtattcatagaatatttcatgaaagataagactatcgcagtaacaattacagctactgtacaaaaaacaataatgctaatacatatcttatttgatttaaaaacacttttcatgttttattcctcttttctataaatatatttagcaataactatttaacatctataatctataatgtatagtttatcaaaatatactatctctaattaaaaaatcgtatattttaaattagtgtaaaatagatacctttattcattaagtgtttgattctttaagtattctatgaaagccctatttaaagcttcaagctgattattggatatactgcttatcttgtttccatttagtatatcctttgtaaggggatcccgagcattgattgtaactccatcaaccactttttgcaaattatcgattcctccatagctttcaacaaaagtcgtatatctactattttctccatttgaataataatcttgtaatgctttagaaagtaataatccagaatctgattttaaattaactccaatattacgcgcatcaacatcagccagcatatcactagcactaaatgagctaacattagctcctattatttctttagcactattcgttaaatcatcaacattatcacctatattactattaatttgagctttttgtaaatctcctattgattgctgtaaatcccctgcccatccagctagatctgaaagttccgcggatacatagcctggccctggatggcttgtaaattcagtatttaaagttgctgcaaaatgtagaaaatccatttctccacctgttttgggatcaataagacttgccccttctccattatcactaaagaaatttaataatccatcatcattctttcgaacatattcaataaaacctgtatcaagaggatatgctgtcaccgcccattttagtccgttgtactttcttcttattacattcattactcctgtgtttattttatatgtgtcatcagttccataatattcctttgccaattcctcaagtttctgtacattttcaataatactatttgaacttgtatttctattcgaattttcagttgaaccatcatcacttgtcccttgagaattactgctctcgccatcccatcccccatcatcacctacattccatccatcaattgtagtgtcctctgccatttctccttgataatatgagtctgaattttccggataaaaataataccagatatttttatctttaagccagcctgttacaactgaatcatcaccgttaagataaaagtatttattatctatatgctgccagcctgcccccgttaccattttaccagtctcttgacatacatagtatccatttgccgttgctcctcgtgccatagagccatctttatacaaataataccagccagttccatcattaacccacttatttgctgccattgaaccatctgattgcaaataataccaaaagccattgatatactgccatcctgttgccatagatccatcactttttaaaaagtaccaggtaccatcatcgccctttacccagcctgtttgcatcgaaccctctaaataataataacacttgccagagtattcatcttttatccaacctgttccgctggctatgttaccatcatcatctacataaaattcctcactatctgaataagatccattaattgtgtctttccgtgccattgatccatcaggataataataataatgaaaggtatctccaatcttattccatcctgtaacagccttccccttagtacccacataataccaaaaatgatccctattaccgtctattatttctcttgaaccttcatctttcgtccattgaccatcatcgttaacataatacccatcaaccattgtatcatgtgccatagttccgtcaccataacaatagtaccaataaccattactttttatccaacctgttaccctgtctccattagaatcgtaataaaaccagaaactatttccgtctaccgtttcttgtacccattctcctccattatcgtccatagtaaccatcctcctctctttctataagaggagcataagtttctctgctgcttccatccattattacattatttcctttaaacttaaattcaccttctattaatactccatgagccttattccttcttgtaagtaatatctggctttgagcttttatttttactttctttctggttcttattaatatttctccatcagcctttaagtttaagctttctgggcttttaagataaactcctctgctgtccttaaagcttatacttaaattactgcttccacagctgacctttaattcatctggaagcattgctatttcatttccttgctctgtatgaaaatatctgttttttgtatcagagattttactgcaggtatctacattttttcttacacagcctgtaactattggctcttcaccttcttcatttggaaagtacagccttacagtttcgtttattaatggcattgagtacattatgtttactgaaggcggcttatatgaaaaccagtacgctgtatcttcatcttgacttccatctatatttaattgaagcttcagctcttcattttgtgttgctattactacaccttcaagagaggttcctttaagctttttattataaattattttctgccatactcccttttctctgcaaagcttatatttataaacaatttcttccttatatttataagcttcatattctcttacatataaatccttttgcttataactaatttttgctcctatttcaagtatgtcttctgcctttacttcataataaaaataatctgtatcattatagtcatggcctacttctttagcttcgtaaaagcttttaaggtcttttactgcttcatactctacttcatcggtaagagaacatgtatttttacttggaagtccaaaataaaatgctgtatttaaattcattatatcacagtataattctgaacttaattcactggcaattctctttaaaaagttccaatcggtttccttatactgaaataatggcttgtctattttctgccctttacccacgttttgagtaaagttaaaacctgaataatcttttaatatctcacttataagcgcatcataagtcatttttacattttgaaaggatctgcttttttcctttatatccagctttgaacttgaggttaaggcttcaatttctaaatagtaaactccatttgtattggttgtcttaaccttttggactattccatgaaataaccttttgctgtttctttcatcaactttattaatattaactgtttcagaatcatttgcatcttccatttcttcataaacgcatatttcatcttctgctgaagcttttatagtagaatcaaaatttatgctttcatcaattaaacattttaaatataaatacccatgcttattaggcttgttttcaatctttatatctgttattttcattaactcataaggtgattttactcttagtttatgaatctctcccatctattttctcccccttctatttcttaagttttttgatgatccttagtcctggccatctgtaataaattttattactcccccataggcacatattaaaattgaagccgttgtaagtgctggtaccccttcaattaaagtatcttctttagtattcatccacttatttaatatcattatctggcacttttttgttttttcactgctgccatttgctgggcagctaccgctgcatattccaaaagtgcttatgttggcacctactgcattatcactttcaatcattattggatttccatttacgtacgctccatgacttacaggcagatttattccttttgtatcagttcctttgctgcatatcatctttgctcctctaactacatatgctgtaccgatctccaactttatcatctcctatttttgattttttcttaaccatcaacttctaatctttttaaacacattcccttaaactctcttctaagcaggctttcagcaacatccaaccttaccacaattaaagttttttcactttcctttatcttgaaaatcttcttatccttaattttctctttgtctaatatgatcttttttactactgtcttgtttaaattccattctgacttttcacttaaagcttctatttcttcaaatattggcatataataatttccctgctttccacgttccaaatctataaggggaatggttttaaatataatgcgtaaatcatacttttcgattattttcttcatttcttctgaaataagaaataaatttctatctaagatatctaaaaactcagtttcatcagtacatttaacattgaatataataatatcctgaatcttatgcgcatttaataaacttatgtttctaacgccgatttttttaaaaacatctattagtactggtgaatttgtatattcttcatcctgctttaataaaaaataatccattttatttcctttctggcaagctctgatttatggttttttagcatttatctgaattccagcatccatatattcacctgccataataactacatcctctttctttttcatttctttataggatgtacattctaaaaaatttttcaatgtatttttaactatttttaaggctaagctgtggtatttatttgcttctgtaagctttatggcttctatatccctctctttaatggttcttaaatattcttttttcttttctgaaagttcttccatatgtttaaaaagaggttcataaatgaaatctaaatctatgtttattgaacattcctctttatctaaaaaccacttttcatcgtataaatcaattctccactgtcctttattttcaagaagttttgttctaatcattgaaaaataaatgtactttatttcaccttttaagtttttttcctgatgcaaagttgtttccctgcataggagatcaaattgtcctgtcagactttcatgtattatctctttatttttattatatttttttatgattttaggaatttctatcttatatctgttttctatatatttttcatcaaattcttttaatacttgatttttgtcagctctttttatcattttttaacacctacaaagttctttcttactcttgaacgttaacttttccgccacttattgttacatcatcttttattaacatacttgcatttccctgagtaagcttaattcctctattccctttaatttgtacatttgctccaccgtttatttctatattatctttggcatctaatattatttttttattgctatttatttctattcctccatcatcagtcattttcataagaagatttccgtttccaattatctcgacggagcctgggctcatgacaatttcttttccatactttgtgcttatactctttacagatggatctgtacggctgtctgaatctgttgatggataatgcattgaatttataacataagaattcttttcctcagcatttggaaaatataatcttatggcatctccaatttcaggcatgcaataccagcctgtcccatcttgttgagaaaatactgttgcaaattcaaaccatcttgcaccatctaattctgatggattcccatctatcttcaatgaaactttaaccttatccttttgtgtatctaacacatttccactaagagatactccaactattttatcattatagatttttcttaccttcattccattttcatctcttaatgtgtaggtgtttgaaattacctcacctgaaatttttgtttcacttttatatacaaaaagttgcctgtctttaaacttcactttattgtaaagtttcattagcttattggttgttatttcatagcttattaaatctgtatcatctaaggtataatcttcgttagatgatttaatattatattccttaagacccttttctacagaataattgtattcatctatttcataaaccttactttctcctgctcctcctatggaatattttattcctgacaattggcattctggtactactggcatattaaaatgtgatgccagccttttcagaaacttccagtcagtttctttatattgaactaaaaatttgtctattaaggcacccttggtttcattgtccactataactgcatttccatatgaactgttgattttactaaaaatatcactataggtaaaactgctattttgatatgatacacttttattttttaaatccagtaaaaaagtttggcttaaagcttctacttctaaagttcttacatgattgtttgctttaatgcttacttttgtaacaattccttcaaataaagttattttattattttcatcattttttaatgaaactttgatagtttcttctgcttctgcttcctcaacatacttatctgaattttcatcacttataattccgctcatagaaagctttgcatgctcatttaattcctttattatgctgagatttgttatcttttgaaactcataaggttttattaaaatatctccaagagtataaacatattcagtactcattagctttcaactccttatctttttttattattttcatagttctaataatttgaaaaacacattctttccattccccatactcaccatatggacatttaaaagttcccattaatgtttttccttcaaattcaagaaaaaacattaaggtgaatattgattcatttattgtataacttttaaattctaaaaaacctatatttttcgagtcatcttctaatactccatcatcataaaatacattcataggatttaaattctttaatatttttttggtttcatttttaaatttttcaacatgttcttcatccaagtaattatcaatgattttcagcgttatataagtatcttcctcttcattgcaacttgttacatctggttcgttttctggtgtatactttaattttctgctttcttctgacatttcttcaaaatctttagggatatacatttttaacttttcctcaaagaaatctttttcttcaaactcataatatcgatttccaatttttattggtccatttttaatatctcttctagcttccattttttccactgcatttataaaatctaaaattttttcgtccgtcctttttttaaccatatatttttcttctcctcatcatgttttaaaacattcgaaaagccactgacttttcttccataattgtcaattgtccattgttaattatcaattaatctataagtatctttttaaatcttccattacctctgcgcccattaccttttgctccatctttagcacttcttaatacttctgaaagatacaagtataaattctcattattataatctttcatctcaatatctaatttatttactagatagcttattattatttctttttgaatagcatccttactctgaacacacgtcattgcaaaggatatatcccaagcttcgcctaaattacactctaataattctcttccaaatcttcttaaaatttcaggacttaagctgctatttccgtaagctgcgtaaggagcatatattgtatttaccgtatcgtattccgtacttaaatcaataaaatctgtatggtctgttctaagctttgcacccgctcttaatttaaacctgcagatttcaatctcattttctttaatatctaacttttcatctaaatagacttctgttgaattcattttaaaatcactatcttgtatttcaggtaagaattttatttttaaaagcataagcttattattacaggtatattcaaccttgatatcttcttttaaaagataaatcacatcttgatattttattattccttccaatatccttatgtagttatcagaaacctctatctcgcatccgcagattattccattagaatatcccttgatcctcgcatcaaaaaatcccctcggaaaatttctaagctcctccagcatctctatttttaaaagtcgtccgctattaaaaagcggataattattttgaaacacctttcttccctccttttcatccaactctcacaatccatatcttataatcaaattcttaaacaaagaacccaaaaactattctttaaattttgtattcggttagcagaactttcactaaatgtacttatgatttgatgatgttagcttaccctgtaaacatccaccaaacacatttgaatcaaattttctcagatattcttatattcttaacttctaaaattcttaagaatatatatggtaatattctcaagaatatttaagaaataaaatacatctttccgaaacagacatctgaaaatctcgctactaaaaatatcttcttctataaaacttcccctactcattactcattcctaccaataaacttcagtcacataccagaaatattggccccatacttttatagaattctacatccagtaatttatttgttatgtcccatattcaatgcacttaaaatgcatacttcaccagaaatcaaatacatttttctgaagcaggcatttgaaaatctcgctgccaaaagcagttaatggaagcttgttctagattggcttgtcatactgaaagtaggatcatgctaatgtaggtgcaagcttccatttagtgctttcagcgatattttcataagtcctgcggaagaacaatgtatttgatttcggtattttcacctgaacttatttaagtccatcaaagaagtttctctcccatctatcattttcaaagtagaagaacttttcttgtcctatataaagttcctcttcttttcttaaaatggctaacacataaaatccccatagctcttcttcttcccatacaaagaatttgacttcattattttctatattatctgtttcgtgctgatttatatttggatatctttctcctattttctttgcgtttgtcttttctaattcttcctcattaaattgataattgtattcatatttcacattatcattgctatcttttaaatataatttaagtagaatcctatccatgaacctagaaataaaccctttatttatttccctgcctttaattagtgttttttgctctccagcatgagtgtaggctgttaataaatatggaagagtaggctttttactttctatatttatatctgcatagccaaaattcttatcatataaatattttagagctcctttaagacaggataattttaattcatactcttctttaacttcctttttgctcttatttatttcaattattcttccaggtataaattcttttagtgcatctctaaatatatccaccttacatgattgtcctgttaatttgattagagaataatcgtataactcatcattttcatataacttttctaaaaatttctttattatgttataaacatcgccttttattaaggtttcaatttcatatatactaagagttatacttggagcttcctttaccacctgtaatgttcctttgttcatgtaagataatttccatttatcaaaatttattatattttcatctaaacttgtctcttccttagacgttaataaaacctttaaaatgtctggattagagaagaataatttctttacctcttctgctagatcaaataagaaatagtaattacttctcaccttacagtaatcttctttacttcttgtttcatatagctgaaattttgttggaattactgcttctgccttttcgtattcttcatttaaagtttcgtataactcattaattccagatttatctatgaatctaaatatatctatgttaaattcatctattattgctttttttaattcactcttagaattacttaaagcatttgccattaatatttttattaactgcaatattctaaaagtaagattatttcctccaaaatccgtatctccattttcataggaggtttctatatctaatctataagagactctgctatttgatatgctaaagctacagccagtaagatcagtagttccccctccacaatctataattaaagctttataccattcgccttgaacatatttcttcttttcaatcaaatctgaaatagtgttatacagtacagctgcactttcttctaatatgtttgaactttcaacggtatagtcacttaaaacatctttaaataatgcatggaatttatatttttgctttgatggacaggatatatagatatttttaaacttacatttaaatctctgctgtgctaaagatataatgtattctagatatgcttttataatgtcttttctttttataaaggtagttttattctttacatcaattactttttcacttttttcaaagtcacttatccacctctttatgtcataaaaaagactcatcccatcatccacatatcttcttcttgcctcaagcattgcatcatgcccaaaagcgtattctatttcatcttcttttatatgcttaacacctacaatacttggtataagtggtgttatttctaaatcttctttgctctcatttattatttttacgaatttcactttatcattttcgtaatctgcgtattcccgattatcagttaaattttcatttaagcctggaaatatctctttatctatataaataccagcagttgtatttgatgttccaaaatcaattgcaagcggcatttttgtctcttttaatggttttacttcaaattgtaatataggcagcgaagtaaactttatattataatcgacttctatattgtctccttcataagtatcataaatagtctctgaatccttttccgaaaaaaatagaagactataatgcttactttcagattctcttgcctctatagattcacctttaattaggtaatattcttctttattattctgtatcaattttttaacattaaatatggtgcaaatcttataattgctatcaactaaaagaacattgccttcttctaacttttcgctacttcttaaaatataattatcataaatttcaagagccaagctttcataaatagttatcttaccaggataatctatatatctattgttaatctcttctttattacttctgcttaaaaatctttcaactctttcaattcctccaactaagtaattctttatgagtttactttccttttctcctctgtatttcattatgagtcttataagttcttctttatcaagaggattaattatgctctttaccagcttttctttattacatatttctcttaattgaaaagttgtcatgagccttagatttttttctttatacttactttttttaatatgctcttcatttcctttatgcaacttgtatgaatataaactcatctttatcctcctaaactgttaaaacatatgaaactaggacgtactaaaatcaatgtctttatcttgatatgccttattcaaccataactgcctcattgattttcatagtgtcattaagtccaataatcccaaaatgcttatcccaaaatattaatggcttcatatttattggcaaaaatgtatctactatagaactaactttattttcaagttctactttttttatttcatctagataaatataaatatttttaggcttttccttgctggaataaattatgctttttttgaatatttccttaaaaatcttcttaaacaattgaattgatgttcctgttttatacaatgtcataaaaccattcaataagacatctacttcatctttattgaaataaattatatttttctttaatttttctccaaacacgttatctaatatatccttatataaaaacttcttatatatttctgttttacatagtccgctttttaagtctagttcgcctaaataatgcaataatatatctaaaagtgcttctcttaactctttgctctcttgaaaatttatattaaacaaatccttaaaaatctcgtaaaatctataatattcatttacctcgataacattatcttctggaagagaatttgaatttaagttatcaagagcaatttccatatatggactgcatacatcagcttgaacaaacttaatatcttctctaggaatggtttcttcatctgcttttagaagcacttcccaaatataattcatatcaatcttccttcacacttatattctggatatataaattgaacttcagatactaagaaacttaaaatatctttgtttaaataattttccttattagctggctcaaagtatagaataagagatttttttatattatcttctcttatttcatcaataatgaagttatttacttcataagtgtgctcctgctcttcttttgaactttccataagtgaaatatcatgaaactttaagtattttgaagccttaaatgaatttataagtcttgcgagctcagtttttgtttttattgtgtatgatttatcaaaagctaatttattagagaagtttatactaacttgattagtcataagttcatactcatatttcttttggtcgtttttatcagggttaataatactccacaaattccactctatagaatccttaatgttagaagatattattactgattcttttgtaaacatagcccaattaatatctggattcttactatctattagatatccgttatcttttccttctttttcaattgagatatcatgttcgtaccctactttatcgatacacggcattggaaaaccgctacattttatgcttaattcctttacgttccaaagtggaaccatattatatttaatgaacttgctataatccccgaaatctacctcaatttcaattatctcttcatcctcttgaattttatcttcgcagccaattaaaaataaatctgctatcttattaatatatggattattaattgttgtccatgcaatattgctgtttataaagcttttatataatctctctattttgcttttatactcattattttcctgaactttaaagtgagcttcataagttttcttatctgtttttattactccctttatattaaaatttctactgataaattctttaaaaatcaaataatcacatttaagaaaaaccttgaacagcttcttgctttctttggcttcaagcacttttaaaatttctttagtatcgtatactttttcttctgtatcttctaatgacataggaaatagaaattcatcagttatatcaagcctgtctcttttaactatagttgaatagatattgtatttttcttttatataatgtaattcgttaaacactcttttttctaatccattaattctattgtttgaatgttcctctagctcttcaaatacactattcattatttttttaagcatgattctgtcatttagatcttttatttcacttaatttctcataaattctattctccatatttccacctacatttacctattagtttatttagatatatctatctcaaaacttagcattttttaattataattatgacttagtaaaagccttgtctatagctgtgattttttccgttactttagctacattatctgtatctccccggctgttatatgcatccttagctaaaaaatataatacttttgctgaagcactatcaccagctgcatattttgcatcagccgcctgtgcatatttatcagcttcactttttttatctgaagtttcactgatttttttatccataagagctattttgtcaactaattcatcagctaaactagtttcattaagatcctcaaatgatttcttagccaattcataatacatttttgcacttacataatcacctgctgtatattttaaatctccattttttctaagatctatagctttattttccttatcttctgcagcttttttatcatcttctgccttcttagctgcatcatcagctgcttttttactatcatcatcagcttgtttcttatctgctgccgccttatcatcgtcagcctttttttgttttgcatcggctgctttttgatcataaattttttgaattttatccattgcttcttttttttcatcttttaagtaataatctactgctaaatcttttacatctagatagttttttaatgcaccgtctaaatcattatcatcgtactgcttatctgctaaagttaataaatcagctacttttacacattcttttgcaatatctattttctttaatacatagtcacttccagcctcttccgcttctcctgacttttctaaagctagtacatatttatctaacgcatcatcatatttttttccttctaaatctttatctccatctaatactatttctgtgtacttataatcttcagttaaattatcaatatcatctttaagtttatatttcttcgctgtatctaaagctttcttatattcctcatctgctttttccatattaccgttctttatatattcttctgcattttgtttaccttcgttaacagacgcaatagcatcctgttttctatttttatgaattataaatgcccctactcctattgctataactaagagtaagagtattgcaactattatagctatttttattttcttgcttctttttggatctatgtatgacttttctacaaatgttaatgctaatgtatagttctcaatttcctttagctgctttgacaaaatcatttcttcaatattatcagtaacctctttaggttcctttgcaccttctagtgaatcctctatctccttagcatcgcaattctcccatattccttttgtaagaattgcaaatgcatctccatcagaaagtttaattttttttgatatataaagtttatttaaattatcttgtcctaaatacgaagaaagattatttctctcaaaatgttttgacattgcatctgatggaatcatttcatcatctactaaattttgagctaacgactgatccttactcttatactttaaatatccatccttaaagtagtaaaatctagtatttcctataactgaatatattaatttactataattagttacaactactgtaattgatgcttttaatctaacattcctactgcttcttattaactcactatttgcatcctttaagtattttcttagaatgaatctattcatagttggcttagctgtgaaatctctaataaatgtagtcactgcaatttttgcgctttctaattccttatcttcatcgattccatcagctactacataacatgcataattatctaattcagcgaatgcaaagtaatctttattttgtagaaaagttccttcttctgatataaagcttgtcttaaacttcgagtttaactttctcattatcgtccaccctaacttagttttattagtttaaataaatttggttttatccttaaaagtttttattttttaccgcaatatttcataagcataatgctgccattgcaattatttttattattatctttaacgttctccattatttgcccacaaatttcatttatattagcttttttatttcctaaaattctttcaatttctatccatcttaacccttcatatactcctctgctcatgagtattattatgtcatttttttgaatttcaattggggtttcagaaatttctatatctctaaacgattcttgtccaatataatataggagtttcttctcctttagtgcatataaagcttggtctttttgaattttcccattataatattgtttttttgctacttcacttatagaatgaccgttacttagttttacaagttccttatttctaaaaatggctagcataacgtctccaactagagcgtaagataataaattatcatatattattacactaagtacacttgctccgcccttatccttttcgactctttttataatttcacggctggctttattaaacgctttcttaaaaaagtatgttatcttttccttgtttccttcctctttaaataacttacttattgtttttacagccacaatgcttgaaattcttcctgcctcattttttcctaacccatctgccaaaactgccatggttccatttgatttatttactacttctaaataatcctcttgtatttcttcatttccaataaatatttcatttgctatctctaattcttgcttataaattcttcttattagaaaatttcgtgctattagtaacaggattaatactgctaatagtaaaaatataaatttcaaatttgagtaatcattaatattaatcatattatatatacctacttattatctccccattcaaaatgctctccacaaaatggtacaaaaagaaatttacttttaccaagctcaattacatcatatggtgacaattcagatggcatataagcaggttcttcatttaaataagcaatacctgatgaatccccaggtaataagacattattatttttcttaggatcatatacgattattgcatgatttctagtagcaatgccattatcccctattatttgaatatccatatcatctgatctaccgataaagtttttcccactttttatcttataatccttaccaacccttgtaccttcaatacatacaagccatccacaaactggttcaatttcttggtataaaagattagtttctatatccattttttcttgaactggttctggtctttcctttgttgaagtatctatattacaatatggacatatagttccataacgcctttcactaaacatatgaccattgggacatctaataagacccatttacctcactccatttcatttaagtaaaagttaacatttcaatgtatttcctattaattaagtaacttttattttccttggctcatctaagtaaaagtttaaccttagaaataaatagaatatctcctctttttaattcacaaggagcatcttttacaattctatattttatatcatcagcagctttctggattacaactccggcattttctgataaatcttctacataccatcttcctgacgcataatttaacactgcatgctcattttctataaatttagagtaaattgaagtacttaaatctataagcatttcatcactcctgccattcttaccaataagaaatgatattcgctctcctatatcccaatttcttataatttcattttcttcgttaaccaactcaattttgcttatattactttcatcttgcactatttcttctttgtgcagtttcttatatagattggtaaatccccatattccaaatccaatcacaataataataatcagtgttcttatataaattgattgtattgtgatatatgcaactacgcatattagtgcaattattacgcctataaatacattaattatctgtattgtcactaacagcttattattaaaattcatattattttcttctttcaaagtaattcactccattacttcttatttatctaatagctagcatctgtaaccattctcttttaaattgagaatttaagctgcatgctctcagacgatatcccctttgagggtatcagttaaactaatttcagaaagagcataaaactctacccgaaaagcttcactttatattaaaaaagctatcaaacattttgcttgtatctattggattcttttccttttttaacttttctttattaatatcattgctgtttgcattaaatccaaaaaaactttcaaaatatttatttaagttttctatactttcacctttatcttgatatgtccttgtcttatcttctctatttgatttattttttttattttttgtttcttgattattcttttctttaaatatttcttgatcatatttttttcttgattcttctttgcttaaaacttcataagcttcatttacttcttgaaattttcttaaggcatccttatcatctttatttctatcaggatgatatttcttagccaaacttctaaatgctttttttatttcatcattactagcatttactgatacatttaatactttataataatctttcaccttacaccccatcttttcagaatgattttagtgcttctacgttatagtaaaagatttttcttttggaacttaactccaaaagaaaaatcaatttaattttaagattaagcgctatatccgccctctattgtaacagtacttagcttgtctttcttttgtcttacaacaagttcaaaagtacctataccttcagtatctccaaatgtttctttataatctactacaaaggcattaggataagttatttttcttataatttgatctgctgaaattacttctacagttacttttctataacagtcagctttttcagctggtactaatgaccatgtacccatttttcttgtgctatcaaatggatctccatcaactgctgttaatatcttacctttaataaccattgtacttcctacatcttttgatcttgcatttgaatcttctggagtatctgtaataagctttactgtttgaacactttctatgctaagatctattgtttctgcgccttcaattttaactttaaatcccatttgtcaaagtcctccttattttaatttttattcagcaaaaccgccttcaaatttaacgctagcagttttgtccttcttttgtttaacatacaatctaaatgtaccaacaccttctacatcaccaaaatcttcttcgtacttaactacaaatgcattaggtaaagtaaattgtcttacaatttgagaagcagaaataacatctactttaacgtttctataacaatcagccttttctgctggtactaatgaccattgtgctagcttgattgtagtatctgctgcctccccatttactggtgtcaaaattttaccagcgatttctaatgttgttcctaagtctgttgaacgtgcattagaatcatctggtgtatctgttttaaactctacagtttcaatactttcgatgtttaaatcaatactttctgcgccctcaacttttactctaaatcccatttttgagcctccctttatttttatttataattaaaatagatttttaatctattataattagccaacttgactgtgtgcatcattacgtgtaatctcaacttctaagttcttaacgttaccgttaaatactaagtcaatattacatgttccattcttttcatttattacaaagttaatatcatcaccatcttttactatggcattagtatattctttatgagccacccacttactcttaacactagtaggattattgctaaagaatttaataatattatcttctttgaaatcattagtatagaatcttaatattctttctatatatgttgttactagtgttttatatattgattcaaaatcattttcagtagcttgtaagcttctagctttataaacagtaatttgttttatatctttaccttcaagctttgcattttcagatgaaaagacaaaaccgaaattttttctatttattgaatttttaatttcatttgtaaaaccagatatttcctttgccaaagtagttgttatctttaaggcattagaacctgattctatatcaaatctaactcctggatattcgctatatatatctctaaaatgctctcttaaatactctgggcattggtatgcagccacaattccagctgctatatatgaacttccaatatagactccttcaatccaaagttttagaatatcttctttttctttagataactctgcagagccttcttcagaaagtaccattcttttatctaatacaactccagacttttcctttggaataactgtgaaattaggtacacatggaattgcaaattcactataagtgttatgcataagtggctcacatttatccacaaacttttcaattccggctgttgctacatggttaaaagtagtatcttctcttggttcaaaactaaagaatatttgtacgcgatacttttgaactgtatctaaaagcattgctaaatcttccatagagtttgaatctgtcttctccacttgcttattagctttaaatctttctcttctaaccttatttttactttgaccttcaagctcaattgatggaactactccaaaccaaattgtgttgtcaaagtcatttttatcatttactgagcttaaataagtatttaatcttggtaaattttgagcatttactaatctgctaagctttgtatttgtaactaacaaacttggcttcattcctttgttctttgtcttgtattgatcaaaaaacatttttacacctaatatcttttctattaatggcttaactgtctttataaaatcatccttagatgttttgtagaaatctaaatatgtgttataattgcttacttctacccctaaatcaacagagctttccatagtagatgctaaaggacagaaagttcttactactaaactttttacatactctgacttcacttcatttacttcatcataatcatcttcaaaagcttcaataagtcccatattggctttatcatctatagcaatcaatgatgtttcttctacctttggagcttctaatacttttaactctccatcttctcccatgcttaagacgcctagtttaagaggttcgtttgaattattcttatcatctcctccaagaagtaaccttgtttttatatcttcaatagcaagtggcaacattgccattatgttattatagtttgagctagcttcttcaaacatgacattaagcttgtcccctagatcaagtttacttggatcttcatcatctaaagcttcatattggctatatgtatattgaatttcctttctggtttgttttatatcatccattacttttttaggtgatatcatatccaatagattttcaaatttaaaatctacattagcaatcccttgagctctctttgtgtcaattaatgtgaataacatttttaagaaatcattagacttattaattggaatttctgttattagttcacttggaaagttctcaggcttttttaacgtatacattactttttgattagtcgcattatagaaagaatatacaactggtgagaacttatccaaaaattcatcaaaactattaactaaaagaagttcattaatttcttttatcttatcgtcgtttaagctgtttaacccttttgtatcacctactatagtaatcaaatctaatttttcagggtttatttcctcaaataatattgttctatttgtttgatttatgacatccactttataatcctcctatattgtaaaattactttttaatcgaattcgtttaatatgatccctcttaccccactatcagtagttttgcattattatttatccctaataatatttttacatattaacgaaattatgtaaattaacccagaacaaaacgtacatatttaggaataaaacgcattttgccctcttttcagcttaaatattcttttaattctatgatatgtacgttttattctttttctattgtattttaagttaatataatatataatttattatttaaaaaaacagctgtctaaaagcaggaataaaatcctatttttagacagctaatttatgtttatttttaattatatttttaaaactttaaccaaattataatttataatctagctttaaaatcttcatatccaaattcttttattacttcaatacctttttcttcactatattttacaattgcaggaagattaactccattaaaggtattatttttaaccattgagtaaatagccatatcgcaaaatacaagtttatcacctggctttaaaggttccttaaatgaataatctcctataatatcacctgcaaggcaagtaggaccaccaaatctatacgtaaattcgaattcatttggctttccagcacctattatattaggtctatatggcattgcaagtacgtctggcatatgacattccgctgaagtatctagtatagctatatccattccatttttcatggtatctaatactgttgatacaaggaatcctgtatttagagcaattgcttcacctggttcaagatatacttgtactccatatttatcttttatgaatttaatagattttattagtgtttctatatcataatcttctctagtaatatgatgaccaccaccaaagttaatccacttcattttcttgatgtactttccgaatttttcatctaccacttttattgtacgttcaagggtatctgaattctgttcacacattgtatgaaaatgcaatccatctataccttcaatatcttcttcttcaaagttagccaaagtaactcccattcttgaattttcaaaacatggattatatatatctgtttctatctctgaatactcagggttaatacgaatagcacattcgattttctttcctttaaagttttttactttatccttatattttctccattgactaaatgaattaaatactatatgatcgctatatttcattatctcatcaaattcatcttctctatatgcaggagaataaatatgtacttctttccccatctcttcatatccaagtctagcttcatgaagagaacttgaagtaactccttttagatatcttccaatcaatgggaaagttgagtacatagagaatgctttagttgccagaataatattggcacctgtttccttctgtacataatctaaagtctccaaattcttcttaagaagtctctcatcaaccaaataacatggtgatggtaatttgcttaaatctatatctttcattaaatcaccaaacctttttctagttataaatttacagtaaaaagtaaggatgaaagccacagcttttcgtgaaaataaactagttccaggaaactctaattaagacttcatccttattttttcgttaatataataatttactaatttagtttaataaattagtatctaaatcattcttaatctcagaaagggcaggtactcttttgtgcagtgttgcatttagaagatggctgtaggtatttcttaattagaagttgttccaaatatgctagttcaaagcttgcctttgaaaccagcattttggatgcaacttctaatgttagaaatccacagccatcttctatagcaaccgaaacaacagagtacctgccctttcagtccgttattacttgattaaaatactcacaatttattcaactaaagttggatcaaagctttctttccatggtaatccccatttatttaactcttccataaatggatctggatcgaattcttctacattatatactcctggtttcttccataaacctttcattactaagcttgcacctatcatagctggaactccagttgtgtaagaaattgcttgagatccaacttctttataacattcttcatgatcacaaacattgtaaacataatatgttttatcttttccatcttttttaccttggaatatacatcctatattagtctttccttttgttcttggacctaatgatgcaggatctggtaatactgctttaaggaattgtaatggtactatttgctttccttcaaattcaattggttcaattgatgtcataccaacattctcaagtacatttaaatgtgttatatacttttgtgagaacgtcatccagaatcttattctcttaattcctttaatatttatacctaaagattctaattcttcatgatgtaataaatacatatcttttggtccgatttctgggaaatcataaactctctttatttcaagaggttctgtttctatccatttcccttcttcccaatagcttcctggagctgtaatttcacgaatattgatttctgggttaaagttagttgcaaatggataaccatgatcaccagcattagcatctaatatatcaatataatttatttcatcaaaataatgcttttgagcataagcactaaatacaccagtaacccctggatcaaatccacttccaagtaatgcagttaaacctgccttttcaaatttttctttatatgcccattgccacttatattcaaattttgctgtatcaagtggttcatagttagctgtatctacataatgaacttttgtttctaaacaagcatccataattgttaagtcttgataaggaagcgcaagatttataacaacttctggtttgaatttattaataagcgccactaattctgggacattatcagcatcgacctttgctgtttgtatttttgtcttagtttttccttctaatgaagcttttattgcatcacactttgataaagttctactagcgatacaaatttcctcgaacacctctgaattttgacaacatttatgaatagcaacgctagcaacaccaccagcgccaataattaaagcttttcccattccaattcctccaatttctttataaaatgaaacttttcagacggagctttatgctccagctgaatttagaatattgacttattattttttgattatcttcaagtcatgaacaaaaaatttaattgtattatctgataatttttctaatcagtaagtccatttaacatatctctaacgtaagttggaagtgcaaagcaccctacatgaagatctgtattataatattttgtttttatccctaacttattccaagcttctgcatcaaaatcctttatagggtgatacttttttgaagcaaatccaaataaccaatgtcctgatggatatgttggaatatgtgcttgatagaccctaatgattggaaaaaatttcgttattttttcatgagcttctttcattgcagccgcatcattatcatagtatggactttcatgttgattaactaaaattccatcttctcttagtgctttatagcaatttccataaaactccttagtaaataatccttctcctggtccaaaaggatctgttgaatcaactattattaagtcatattcatcttctttatcacgtataaatttcaaaccatcttcatagaatacattaactcttttatcatcaagcttacatgatgttagcggaaaatactctctacaaatatcaacaactcttttatcaatttcaaccatatctatcttttcaactgtgctgtatcttgtaagttctcttattgttccaccgtcaccagcacctataactaaaacattcttaatatttggattagttgccattggtacatgaactatcatatcatggtaaataaattcatctttttcagttaccatcattaatccatctaatgtaaaaaaccttccgaattccttagcttcaagtacatctattctttggaattcagttttttcagtatgtatttctttttcaactttaattgaaaatcttacattttctgtgtgttgttctgtataccataactccatttacttgtcctccacaacattaatattttcaattttagtatcttctgttccagttaaaaaacaacctttttcttttgcataatttatgtagtccaatatttcttttgttattttttctcctggagcaagaattggtattcctggtggataacacattacaaattcagcacatattttctcactgctttcatttagcggcactgaagttttttgagaataaaatgcttcctgaggagttaatacaacttcaggatctatatactcatgatcaaacataccaattttatcttttgaatgcaatctcttaatttcagataatgaagatattaatctttcaattgcaagactacgatctccaacagaaataatagctaaaatatttgcaatgtctcccaattcaatttgtataccatactcatctcttaatagatcatatacttctattccagcaagacctatttctctagtgaatacagataactttgttatatcaaaatcataaaccgcatctccatcaattaactcttttgaaaaggcataataaccgcctattttatttatttcacctctagcatattcagagatttgctttactttatcaaaaatttcttttccatgtaatacaagatctcttcttgccaaatcaagtgatgacattaaaagatatgaaccacttgtagtctgagtcaaattaattatttgacgaacatatcctattgctaaatcacaatttaagagtagaaaagaactttgagttaaagatcctccagtcttatgcatactgactgctgccatatctgccccagcatcaactgctgataaaggcatattgtcaccaaaataaaaatgtgttccatgagcttcatctactaatacgtacattccattttcatgggcaagtttcgtaatttcttttaaatttgaacaaatcccataataagtaggattatttacaaatatcgcttttgcgtctgggttttctctaattgctttttttacatcttcaaccgacatcccaagtggtattccaagttgtttatttgttcctggatttatataaaccggaattgctccgctaattattaaagcatttatagcacttctatgcacattacgaggcattataatcttttcaccttttttacatacactcataaccatagcctgaactgcagaacttgttccattaaccattaaaaatgcgtgtttagaaccaaatgcatcagccgcaagctcctcagcttctcttataaccgataccgggtgaataagattatcgagtggtttcattgaatttacatctactgaaagacattgctctcccaagaattccctaagcatatcgtttcctcggccctgcttatgacctggtacatcaaacggaaccactctagctttcttatattctattaatgcttcatagattggtgctcttgagtgggattctttgtttttcatcgtatacatccctccccgttaatatatattagttccactaaaaatctcaatcatctctcttcttaagttgttttcaatttcaagtctttgctttggcttgatttcataaacatctctattaaaaaggtaattttgaagttcaatttctttaattagcattttagtgtgaaatatatttgattgatatacatttatatccattgcatcatatctcttcaaggtattttcatcaatataatcttgtattgatgttattttatgatctataaataattttttgccatcaacatctcgggtaaaacctctgacacgataatctatcgttatgatgtctgaatcaaaacttcctataagatagtttagtgcatttagcggagatacttctccacaagtggctacatcaatatcaacacgaaaagtagcaattgaattatctggatgatattctggataagtatgcacagtaacatgacttttatctaaatgtcctacaacagtgtctctagttttcaaaatgtcaatttcacctttattacaagatgcatctatttctttgactgctagggtctgttccgatactagaatagttacacttgctccctgaggatcataatcttgttttgaaatattaagtacatgtgctccaatactttccgttacatcacacagaattctagtaagtctttctgaattgtattgctcatcaatataagcaatatagtccttttgctctcgctcactttttgcatagcatacatcatagatgttaaagctaagtgtttttgtgaggttgttaaagccgtataacttcagcttgttttccaaccctaacatcacaacctttctggcataaattatagttgcattagaatttgtttcaaaaattcaatcactaaaatcctatatattctaatgtttataaccttcaaatactcaccttctagtttaccttgaaacatctttattatacaacattgacattttactatattatctttaaaattgctactatttatgacaatatttctttaatatacttgataaatttgtttgaagtcccttatgctttattttggttgcaaatccttcttatttctcacatatataaataaagtaataattaactattttttcttaaagctctttcttttacatattgattatattcttctattgaataaacttctggttctcttacttcttccaagaaatgtgaagcctctgcatctgcattactaaatgccaaaactgacttatgcatttctattgccttgttgtagtctctatattcatcctttggaacataagcacccatatgccatcttatcattaaacattcttctaatgataacttgacaaactgttgaagtagaattacacttttctctccatgtcctaaaggaattttatcgtcaaattcataggctgcatatcctatccactttcctgtcatctcatctttttttaatctcatagttttttcataaaaattacacttacacaaatcatgtagatatcctgttaaatacattgtatcatgactcaaacctaggttatattgtttatttttttgtattaataattcaacaacattatcagagtgaagtgctaatcctccatcaaagtttgaatgaaacttagtagatgctggggctgtaaaataatcggttctttctaaaagatattttattaattcatctatcccatctcttttaatcgagctcaatctttctaatatcttatctttcaattcttgcatttcttttgctgccttagcttttgtcatttcctttaagtcacttaaatcactcatgaatacatctccttacattaatcaacttataattattatttttttcctctaagcacatatctattcattattatgcttcttttactattttaacacttttaagaaaaaactcatatcattgaattcaatgatatgagttttctaagttaaaaatattctttctttattttaatagtaacatattccatagagtttataagcaaattttatttaaaaaagtattttattcttctactactggcaaggcgcttaaattgtttgactcatcatcatctcttaaactccttaaatattcctcaccttttcttgatgttgagacagatactccagatatagctccatctttggctagctccacgcctctttctttagttattctctctccatttgaaagttcatatcctgttatctcacccgaatgctttattatagcctttatagagcttttttcaacatttgactgtgaatcttcgttatcacttaactttatgtcagtatttgctacagcagcattatgaataaagtcatatgttaatcccattgaagatacattatatttatcctccatacaaacacctcctattttctagataagcatatgtgtatatttctaaactctgttttttaattttttaaaataaacttgctgaataattaaaatatagcaagtcagtattttagtatattttcttttatatgcctattctaaaaacctttagtgttatattgtccaataaaaatactttaatgcattctattatttactatttaaatattgatatcaaatttttgtaattcatcttccagtttccttggttcttttaagactattccttttaatccaagcttaatagcagcttcgatattttgctccatatcatctataaatagagtttcgcctggttctaaactatatctatatagtatcttctcataaatttctttttcaggtttaagtaatttctctttataagaaaccactcctccttcaaataatttaaataagtcatacttattatttatatattcaaaagctgctaaatgaaaattagatagataataaattttataacctttttgctttagttttttcaatgtatctacgctgctttctattggaatcagcatatcgtaccaattttcaaagactttattaattaactcttcactttcagtgtttctgttaattatatttcttttagcatcttcttcacaaattgttcctctatcaagcattggccattcatcactctgaaatatacatttatatatttcctctactttttcttcatcaatttttgatcttacatatatcttcggttgaaaatctaaaataacatttccaagatcaaatattatatttttaatcataaaaattctcctaattttaataatgtattttattaactatagatatccaattcaagagtcgtacttattaaatgaatatatccacaaggtttctaaaaattcaagttcatatcttcactagaaatcataaatatatttgtaaccacaagggtcataatatgaagaaaatattttaaaatgagctgttaaaggttcttaagcagagaacacaaatctttgatttggtgagaatcgcttactcagtgaacgaacgtgagtcgagtttccgctaacagttgttccattttagcttgtcaaactgaaagttggagcatgctatagtccaatttctcctgctacatttctcattcctaaaattgtattttctataaccttgtctaattccatatctatcatattgcaaccatttaatattacatttctgtctacacctgccgcaaacccttttgccttaaattttttcttaacagacttaacttctaaatccattatgcttttagatggtctcattaatgcagccgcacctataagtcctgtaagttcatctattgtataaagcactttctcagcattactttcaggttttatttcatttactattccatatccatgagatgcaactgctcttatataactctctggaaatccttcttctttcattatttcttgagatttagcacaatgcttatctggatacatttcataatctatatcatgaagtaatccaattatgccccatacatcctcatcttcattatagagtttagcaaagtgtctcattgccccttctactgctagtccatgttttctgagtgcatcacttttattatacttacaaagtgcgtcccatgccttttgtctattaattttttcttccatattatatagcccccttaacatatgtatataaaattatttttattaacatttatttctatatatgaaattatatccatgttaataaaaataatatcactatgaatatctataatcaatattattaggatttaagttataaaattatatatattatacttaaatttctaaattataacccaatgtaaaatccttctcactagcatttttaaatgtaaatttattattcacctttataaatgcagacttcctatttataagtctgcattttatggctaatatttttatactcatcctttagcttagtaattactctttcttcatcatatttattatacggccatattctagtttctaccttacatctaatccactcagcttttaaacatatctgcacaagctcatctatatctctatttaggctttcaatttcattttcataattacttactatataatcgcttttttcaactatattatttattaattgcaaatcatctctgtatgcagatttaacttcatttttaagttctagtaaatttaataaatttatattatttttatgttcaacattcttataactatttgccatagccaaaaattcctttaatatttttttttcactcattacatctatagcttcataaaatttcgttgttatatcttcatttctttctgcagattttattgcatttttacaataatatattaataaataactattaagtgtagcttttaattcttctacttttaatattagctcaatatctagttttcctgtaaaattcaaatgcattttaatcaacgatactattttatctaactctcttctatattcaatcttattacttccatctttagttctaatatataagttagttatattgcttagctctttcaagcttgcaatatgcgttcttaatgtagttatccatatgactctaaatcttgtaatattatttatgtaaagagttttcttgttttgaaataaattaagcactcctgttaaaagagttattaatattcccgtaaatgtaattatatctattattgctatctccagttctccgattctcataaaattctcctaagttccttagcttatattatctagttgtctttgttatttcatcaacaaacataaaaaagaactaagattacagttctcagccctcgttcttgtgtttattttattcattttttcctcttttattctgtattctaaacataaaatattttctttcattaatatatatatttcaaaaatgattcttcatgataattctaaaaatattgcaataattttagttgcaattgtgaattgtgcaatgtgcgttgcgcattgtgaattgcaacatatatatattttattatagattaaattttagtatccttttatatgcctctgtaataaactataataaagcaattaacaaaaaggtggtaaaatgaatcctttattaagtatgatactcagttccctttttaatggaatgggtggcggatttagaaatcccatgatgcctaaccaaaatggtggcagtaatccaaatcaaatgggtggtaatcctttattgaacatgcttatgggtggcatgggtggcggcatgaaccctatgaatggaaatccattaatgaacatgttgatgggaaatatgggcggatctaacggttctccatttaataatccaaataacaaccctaacatgaataatgcaaataatatgaatagcaatggtccaaatatgaataatatgggaaatatgaacgatattaattccttattaagtatgctaatgggaaatcagggcaatatgcctatgaataatatgaataatatgaataacatgatgaacaatatgaacaacaattcaaataggcattcccattcaaaaaaatagtggacattctaataggtagcttaaaatttaggctacctattaaattttataacagtaagccttttctataaaaatattctaaatttatatattttcaaataatcacttcagaaataattattatttgtaatctttctcatgaaagatcaagcttatcactgttgtcctattaagcctctatctatagtgtatattcacagattttgtatatatctaaaaaattctaaattttcttaattccctctttactttttaatagtaatcgcttactattaaattaaaagggaggtattaaatatggagaatattaatgtattaaaaagtgatttcacaaaattatttgcaaaagatgctgaaagtgttttcttttcacctggaagagttaatttaattggagaacatactgattacaatggaggtaatgtctttccttgcgctcttactattggaacttatgctttagttagacaaagagaagataaaaatgtattagttaactctttaaactttaaagaattaggaattttagaatttagtttagagaatatgatatatgaaaaacaacacgattgggccaattatcctaaaggtgtaattaaaacttttgaaaatcatggttataatattcctaacggatttgaaatacttttctatggaaatattccaaatggttctggattgtcctcttctgcttcaatagaagttttgatgggaactatattaaatgatttgtttaatttaaatatcaacatggttgatatagtaaaaatgtgtcaagaagctgaaaataaatttatcggtgtaaattgtggaataatggatcaatttgctattggcatgggaaaggaaaattgtgcgattcttttagattgtaataccttgaaatattcatacagtactattgctatggatggctacaagatagtaattgccaatacaaataaaaagcgtggtctagctgactctaagtacaatgaaagacgaagtgaatgtgaaactgccttagctgaaatacaaaaagttaagaatattaatgctttaggtgagcttacagaagaagaatttgaagaagttaaatcttgtatttcagatcctattaaagcaaaaagagcaaaacatgcagtatatgaaaatagaagaacattaaaggctgtaaaagctctagaagaaaatgatttaactctattcggaaaacttatgaatgattctcacatttctctaagagatgattatgaagttactggaatagagctagatactttagtttctcttgcttggaaaagtgaaggtgtaattggagctcgtatgacaggcgctggtttcgggggctgcacagttaatattgttaaagaagactgtatagattcatttgtagaaaaagttaaagccgaatatacaagcaaaattggctatgaacctagcttctatgtagttagcatttcagatggaacaagaaaaattggataaaagatttactacttaagattttattaagttgattataagaaagatttagtttaaatttaaagtataagtctttaaaccaaatcaataaaaataagggagatgttaatatgtcaatattagtttgtggtggtgctggatatatcggctctcatacagttcatgaacttgtaaaacaaaataaagacgtaataatagttgataatttacaatcaggtcatatgaaagctgtaaatccaaaagcaaaattttataaaggtgatataagagattctgagtttttagataaagttttttctgaaaataaaatcgatgctattatacatttcgctgctaattctttagttggcgaaagtatggtaaaacctctactatatttcaataataatgtatatggtatgcaaatattacttgaaagcatggtaaaacatgatattaagaatatagttttttcttcaactgcagcagtatatggagaaccaaagaaaattcctatctctgaagatgatgaaacaaatccaactaatacctatggtgaaacaaagctgactatggaaaaaatgatgaaatgggttagcaaagctaatggaataaattacgtttctttaagatactttaatgcagctggtgcactagaagatggaagcatcggtgaggatcactctcctgaaagtcacttaatacctctaatacttcaagttccacttggaaaaagagaagctataactgtttttggagaagattatgatactcctgatggtacttgtataagagattatattcatgtactagacttagcagacgcacatataaaagctgttgagtatttacaaagcggaaataaaagtaacatcttcaatctaggtaatggaattggctttagcgttaaagaaatgattgattcagctaaagaagcaactagtgaagaaattaaagttgttgtgggcgaaagacgtgctggtgatcctgcaagattaatagcttctaatgaaaaagctcaaaagattctaggctggactcctaaatatactgatgtaaaagctataatcaaaacagcttggacatggcacaaaaataatcctaacggatatgatgacaaataataaaatcatatagaattttaaaatttatcttgggaaactagagccaacctaaaaacttatatggttcaagtttccgccacctaggcatagaaaaagataagtctatgaaataaactaacatggacttattttttagatatgtcttagattaataccttttgttaaaattgaggaggttttagcatgataaatataaatcatgaaataaatagacttatgaactttgcattgaaaaaaaatcttataaataatgatgatataatttactctaccaatatgattcttggagtattaaacttaaatgaatttgaagtttgtgaagttgatgaaactttagaaactccaactcctatcttagaaaatatcttagactacgcatgtgaaaataatttaatagaaaatacagtgactgaaagagacttatttgatactttaattatgaactgcgtaatgccaagaccttctgaggttataaataattttaataatttatataatatatctccaactaaagctactgagtactattatgatttaagtatttcttctaactatattcgaaaagatagaattgataagaacataatctggaaagcaccaacggaatatggagacttagatataacaattaatttatcaaagccagaaaaagatcctagagatatagcaaaagctaaattgattaaatctagttcatatcctaaatgtttattatgtaaagaaaatgaaggattttatggtcatataaatcatcctgccagacagactcatagaattatacctttggattttaataaacaaaaatatttcttacagtattccccttatacttattataatgagcattgtataattctaaatagcgaacatatacctatgaaaattaataaggatacttttaggaatttattgatttttactgatatactacctcattactttgctggatctaacgctgacttgcctatagttggaggatcaatactatctcatgatcattatcaaggtggtcactacacatttgctatggaaaaggctataatagaaaaaaactactcagttaaaaattatgaagatgttgaaataggtagagtcaaatggcctatgtctgttgttaggctttcaagtaatgataaagataaattattagatttagctgatcatattttaacttcatggagaagttattctgatgaatctgtaaatatattaagtcatacaatggatgaaccgcataatactattactcctattgcaagaaaaaggaataataagtacgaactagatttagtcttaaggaacaatagaacaagtactgagcaccctcttggtattttccatcctcatagtgaagttcatcacattaaaaaagaaaatataggactaatagaagtcatgggacttgcagttcttcctgcaagattaaaagaagaattaaacattttaaaggaatacttaattaatagaaaagacaacattttagatgatgaaatggtggcaaaacattctgattggtataaatatcttctagaaaaacactctaatatatctcaagaaaacgttgattctattttaaaagaggaagttggatttaaattcttagaagtattatgtcactccggagtatttaaaagaaataaagaaggatttgctgcctttgataaatttataaatatattataaggtggaataattatgaaattaaccatagtagatgtagcaaaaaaagctaatgtatctgttgcgactgtttcaagggtaatgaatggcaattatccagtgaaagaagaaacaagaaaaagagtacttgaagtaatagaggaacttaaatatattcccaatatgcaagcacgtgagcttactaaacagaagtcagctactataggtgttgttgttcctagtatcaataatatgtttttcccagaagttataaacgggattgaaagcagcttaaaagcaaataatttgtctttagtgctggcatgtagtaataatgatagtgaagaagaaaaattatgtgttaacaatttattatctaggaatgtatctggaataatagttattgacccaaatacagaaaatattaaatctaaattttttcataatatttcaaaacaaactcccattgtttttgttaatggacattccgtgtccacaaatatttcatctgttgtaaatgatgaagctatgggtgcaagtatggctttaaactatttattagaaaaaaatcacaaagatatactatttgttagaggaaaagatagttattcttatgacgtaaaggaaaaagtttatacagaaataatggatgatttaaataattttaatccacaaaatattatcaatataggaaatggaaatagtagtgaaactgttgataacactgttaatatattcctaaatgtccttaaagcatctactgcaactgcagttcttgcctgcaatgaccttatggctgttggtgtacttaacgcttgcaaaaaactaaatatagatgtaccagataaattatctattataggatttgataatatagatttgagtaaatttgtagaacctaagttaactactatagatcaaaacatgtttcttcttggctcaaatgcagcaacgctgctattagaaaaaatagaatgtgataattcttgcagcaagagaattattcttatgaacactttaattgagcgtgatactgtaaccgctatttaatatatttattaaaataaataatgcatttgttatagttactgattatttttaatgtaacatataccaaagcattatttttttaatttaatcataaataagtttataacttaattctatttacatagaatttactcttacatacggaatttaacttttcattttagtttttttatcaaaactttaaaatgaattcattgccacagaacatatattcgtatataatattcctaacgaatatatgttctttttctatttgtatatgttttaaataatatgattcaatcattatagaattatctaattttttattatcttatattttataataaacttcgatgaattaaattttttagagcgtgtatattttatgataattaatttaactttaaaattctattccctacgtgcttagttaatgcaaaaatacaaaaactaaattccaatacaccattcaagttttgtcagagcatatattttaattttaaagtttcattttataaggaagtgtaatcaaaatggatttaatggaaaaattaaaaatattatctaatgccgcaaaatatgatgtctcttgttcctcttctggctcaaagagacagaatgctaaaaatggaataggcaatgcttcagaagctggtatttgtcacagctttactccggatggacgttgcatttctctccttaaaatattattttcaaatgattgtatttttgattgtaaatattgcattaatggatcatctagagattttttaagagtaagctttactcctgatgaaatatgcagtcttgctattaatttttacaggcgtaattatatagagggcctctttttaagttctgctgttatttataatcctaattatactatggaacttctacttaaaactgtgaaaaaactgcgtatagaaaataagttcaatggttatattcatctaaaagctatacctggcgctgataatgctttaattgaggaagctggaaagtttgtagatagaatgagtgttaatatagaacttccttctagcaatagtcttaaacttttggcacctcaaaagagtaaagaaaaaattttacaacctatgaaaactataaaaaattcaatacttaattatagtgaaatgaaaaaaagcataaaaagtacaccattgtttgtaccaggtggtcaaagtactcaattaatcgttggtgcaactcctgaaagtgatggaaaaattctaaaactctctgaagctctttacaataaatatagtctaaagagagtgtactactctgcttatgtccctgtaattaaggacaataacctgcttcctgacattacgcatccaccaatgcttagagaacatagactttatcaagccgattggcttcttagatattatggatttaaagctaatgaactcttgaagaatgatgatgataactttgatctaaattttgacccaaaaacacattgggcattatccaatttgaatgaatttcctgttgaaattaacaaagtctcctatgaaaaattattacgaatacctggtataggagttacttctgctaagaaaattttaaaaataagaagagttcataatctgacctttgatgacttgagaaatctaagggttgtacttaaaagagctaaatattttattacctgtaatggaaaatatcatggagatgttctttttgatactattaaaataaaaaataaacttctagaacacgatatttctaaaagtagcagtataaatcctaatcaaatatcattttttgataatatttcatttaatgatgtaaagcttccttctggaattatattacctaaggataatatttctttatcacatatatcacctataaaaattgaaaattctttaaataatataattcctaagtcaaatatattaacattaggtgataaaattacttctttaactggagagttttgattatgaaaatatacttatatgacgatacttttgaaggcctattaacttccatatatgatgctttttactcaaacggatcacctccaacatctatatatggaaaaagccaaacaaatactccccttttactagggaatatagttgaaatttctactgatattaataagttcaaaaaagtaaaaaatgctattataaataaaattaatttcctctcattaaaaaaaatatactttgtatttttaagtaattatgaggacaaaggaataataatatttaattatttaaagatagcctttaaactcggaccagatgttcatgattttttaaatatagatgtaataaggcttgtagataatattacaaaaaaagttttaaatgaatgccatagatttgaaggatttattagatttaatcaaatagaagagaaacttttatactcttctattgaaccagataatgatattttagagcttattggagatcattttaaaaatagatttcctagggaatattttattatacacgatatttctagacaaaaggctttaatatataatacaaatttttacgaaataatagatatggatatggaaacttatgaaaaactaaaatttcacaacgatgaatatacagacctttggaaaacatattttaaagccactactatacaagagcgaaaaaatcttaaacttcaatgtagaatgatgcctaaaagatattggaagcacatactagaaacaaaaatataatttaggtttactgctaaacactcgaaatggaacatatacgtttgttccggttctttgaagatttcacaaaagcatatattccatttctaatttagtagtaaattacagtaaatctatactcaaacaaatatttttatatttctattgttagtaacttaagtagatgaaaaaaataatatattccaagcacaatgattacttcgtgccagacaaataattatattgttgccccatatagatatacaagttttactcatcggaatgttaaatttttaagtttaaaattattgagtatttattaacactatagatttgataactcataaaaataggttgctaaatctcaatccaccatattgatttctaagtattcgcgcctagatatagaacctaaattaaagcttatattttcaattacaatacatacgagaaaggaaggtcatgcttttgtggaagtgttgcattgagtatttgactgtagctatttccttagcagaagttgtttcatttattgcttgtcacgagcttgcctcgggatcatgcagaaatgatgcaacttcttctattggaaattcgcagttaaatactctagcaacctggaataaatgcatgaccttcctttcggtgtttacatatataactttaagtttactctagatatctagcgcttcgccatacctttagtttgcgtctttaatgtctccatctattatgatttctagttctccagtttcaggactcatgataagaccatgtacccttacatcactaggtaaaagaggatgatcttttatcattttaacactttcttttattgattcttcaacagattcaaaaccatgaagccatctctcaacgttaactcctgcgttatttaaagtagagagcgtttcttccttaattcctctatctaacattttatcaacaagtttttttgtgtttaaattactcatcccacaaccatgatgtcctattacaaaaacatcttctgctccaaattcatatactgcaactaatatacttctcattacgccaccaaatgggtgcataactgttgctcctgcatcttttattatttttgcatccccatttttgatattcatggctttaggcaacaattctgttaatcttgtatccatacatgataatatcgccatctttttcttaggtatcttagttgttacatattcctgataatctttgttccccacaaaactttcattatactttattatttcttctaatttactcattttagccccactcctcgtaaattttaataatataatacgtttttttattaacttaatattaagttaagttggtttgattgtaaagttattttatatatcttttaattcttacttactcatgtattcatgataaggcaatcgaattgaaactcctgtttgatcaaatttatattctgtatcataaagcgggtttttattagaaacaagattaattccaacactgtaaagtgctttagctaattcataaggatcctgtagaacagacccagtcattattccttgtttaattaattcctgtgcctctggtattgcatcaactcctacaactgctatattaggagtcttgccacccttattatagccatattcttgcaatgctttaatcgcacctatagccatggaatcattattcgcaattatagcctcaattttatttccatactgcagaaacaatgttttagtaacattcctagcttcttcctcattccaatcacaaacccttaatgcaacttcttgagtctttattcccgaattattgatttttaatatagagtattctgttcttttaattgcctctaaattattttgttctcccattaacataacatattgaagtatatcatctttatttttatccattgctgttttatttttattccatgcatttataataacttttccttgtaatagtccggcttcctcagcctctgttcctatatagcaagctttattataagatcttatagaatctatcgcaactggttccctattaaatagaattactggaatattaattccttttactttattaataactgactgtgtactcgttgtttggactagatttactagcaaaagatcaacatcttgcttttcaattaagttattaatatctttatcctgtatagattgatcattcttcccatcataaaaaataaattcaatgtttccttcgttctctttttgtattttttctaaattttcacgaactaaagaaatataagcatcatcaaatctatataatagtacagctgctttaataggctttccttcagcaattcttgaactcgccatgatattactttgattaatgcttattagcatagctgctgcaatcatgataataattatggtagttattttcttagacatcttatactaatcctccatattttttattataagttatttaataaacttaaataaccttagatattatcattacttatatatcctttgtaaggaatacgtactgcaactcctgtatcatcaaacttatacgaagttccatcaagtggaggtctaccattaaccaaattcattcctataagataagtcgcttctgccatgctagctgcatcttgaggaacagatccagtcataattccttgattaatgagctgtatcgctttcggtatcccatctacaccaacaattggtattgtcctatttttatctccactattatatccatacttttgcaatgcctcaattgcacctattgccatagcatcattattagaaattataacttcaattttatttccattcgataagaataatgcatccatagcatctttagctaagttttcttcccaattacaaactctcaaagcaatttcttctgttttaattcctgcatcattgattgataaaacagaatacttagttcttccaattgcctccaagttattacgcggtcccataagcataacatattgcattatattatctccatttttatcaataattgttctatccttattccataagctggaaagaagttcaccttgcagtattcccgcttcggctggatttgttccaacaaaataagctttactatatgattttacagtttccatatttagtggttctatattaaataaacctaaaggtatatttttttctttgactctatctacaattgtcctcactcctgttggatctactagattcagtaatataatatctgcatttcctgcattaagtattgaattaacatttctgttttgtaatgattgatcattcttacagtcataaaaagtaaattcaatattcccttgattatttttctgaatctcttcaaaactttgcttaagtaaggcggtatatggatcctccaaagtacgtaataatacgcttgctcttactggccttccttccgtggctgttaacttggtattggcaactactttattagaatttaataataaatttattatcataaccataatagtgaataataccaatatctttttagaatttctcatttttatcctccgttgatttatcaaatagctccctactcttcctagcatctcgatacttaaggttcctacgaaaataaacctattttcatagtactttgcaaagactttgccttcatggtcagtttctatacataaaaagcacattaaattttatctttatttcttaaatcatttattttattatgtgtgtaataaagaactttatactggtataaggcatattgaatataatctaactatagctatagatcctgctgataaaaatttataaaaatagaagtatgcttatacaaaaaatgaggtaaatcgaaaaagacttacttctttttttgtaataaatatacttctacattatctatacataatatataattttatttattttctatatataaatcaacattatcactagtaacctcagcatgaggagtcctaatatactttcctttctcaagtccctctatggaatttacatttccatgagaagctaatgtatatgcaagattgaagatcgcatttgcctgttttttcgaatcgtttaaaatagttcctatcatagatccatttttcactgcctctaacgctttaggaagcccatcaattcctacaactagtggttttttaccgcctatattagcatcatttattgcatttattgctccaagtgccatttcatcattattgctaaatacaacttcaattttatctccaaaatttttaatccattgtgacatctttgttgttgcctgagcactttgccaatttgccgtatcatcagctaatttctctaattcaattccattttgagttatagttttaatgcagtattccgttctaattaaagaatcttggtgtccctgctctccttcaagcattacatactggattttgccatctccatttttatctaccattttattgtcttttttataagcatttataatgatatttgcttgcatctcacctgattgttgcgcatctgctccaacgtaatagagcttattccatctttccatatcttcctctactggttcacgattaaagaaaacaattggaatattagctgattttgctttatcaatgatcatagatgccgctgtacgatcaaccatatttacgcatataacatcgtaattctgcgcaacaaatttatctacttgattactttggttaattaaatttcctttagcatctgcaacattcacaatgatcttatatttaccttgattctccttttcttttgctatatcctcaatattctttgaaatttctgatatgaatgcatcatcttgtttatataaggttacacctatttttatttccttaatatcattactataatttgctgatttcacatttgcactacaagatgacaatacattaaaaattgagactactgttaaaagccctgataatttcttaattaatctcactacaatccctccaccatatgattccatcaagcaccacaatacatttatacaaaagttcatccttgcatttatggtgcttatctaacaaatgggaataataatctttgattttcttccgaatacatattttttgtatttataactgttgaagagataatgttattgggcatatcttttttattaatcttatatactgctgattttatacttagatatcctacattaaattcattttgaatagctgttgcactaataaccttatcttctaaaaaagaaagaattttgcttgtacttcctgtcccatatatctctattgatgctttttctttgttaatacccattacatcctttttagcttgagaaacattttctaataatcctgcatcaaatgtaaccacaacatcaatattattgttctctaacaaacttttagcttgattataataagtagtctgcttatcttctgaaaaatcccaaaatgtacatttgttatatgttcgattcataacactcatgaatccattatatcgttcctttacactgctgcactctaagttgtttttgattattaaaatattcttgttcatatctccgttctttattaattcttcccccaagctagatccaagcttatagttatcacaagaaatactaggctgagcatgttctgattttatagtagaatcaaataatataattggtatcttttttctagcattttctattggttctgccattttctcgtaatctgcaggcgatataattattgcatctgccttattttttatctctcgttctataagttctttctgttcgtcaatactattatcttccgacaaagtaacaaaacttacattaacattcatttctgaagctgcctgctctatcccctgtctcattatcattaagctttcactgtttcttcctctagttataattgatatgttgtatatccttatatctttttcatgccacaatgtattatttaagaaaagtaagaaagataatattaatagcaaaaataaagtaataaaaatttgcttcctttttctcttcactatttatcttcctccctctttctaatttcataaaagtccacacatggcatatgaatacgaactgttgtcccttcatctggctcgctataaatttcgagtccatatctctttccaaaatatagttgtattctttcattaacattcttcaatcctataccagagctcttcttttcaatcttgctttcacctgttaaaaggctatttgcaacatcttgaagcattccaagtccgttatctacaacatcaatatataactcattatcttttgcatatgcctttactaaaatctcaccatctccccccataaattccataccatgataaattgcgttttcaattaacggttgaataattaatttaatacttccataattaagaactttctcatcaacttcaatattatatgtgaatttatttttataccgtatattttgtatggtcaaataatttcgtgcatgctcaatttcatctctcactgttattatatttttgcctttacttaagcttattctaaaaagttttgctaaagcagttaccataattattgccccatcataattttcattttctatcatccatatgattgaatccaatgtgttatataaaaaatggggattaatttgtgcttgaagagcattaagctcactttttctttttgattcttgttcaatcattatgttgtccataagtgtatgcatttggttgaccatagaacgaattgcttttcctaaatgctgaacttcatatgatccgcttatcgaaacatctacatcttttactccattttccaatttcttcacacacttttctaataatcgtattgggttagctattcttgaagagacaaacatattaagaaatacaagtataaagatagcgaaagacataatgaacacagcaaatatactcatttgataataatctgaagtaatatctaacatcggtgtaattccgacaattttccatccagtgtatccaacagttttaactgtaactaatcttttttctcctctgaaagtttctatatgatttccatcatcataagctgcttcaattttattattttcatctattaaatctgaataaatcaattgctgcctaggatgataaataatttcgccttctctatcaactagataaacatatcctgactttcctatatttgcatttttacatatctgctctattccactaaaatttatatcaactaacaatactccagatgttgttttcttattattagtaagttcaatagccctacttaatgatacgacccaacgatatttataatctggatctacaaataaattttgaacatgaggtgttgaaaaatgtaaattttctttcttatctatcgctttagtaaaccaatcactcactcgtggatcaatagagctttttaattgttttacaggagatgccgctataacttctccatcttgcgaaaaggtacatatgcttataagtgaatctttatttgtttcatacaataagtccatttctttatctatggtatctgtagccaaatctttcttcttaattacattgtaataagtggtatcagacactttcatcatattcctcagataagaatctaaattcaaatttacttgatctaacatagatttattatgctcagataccatttcttcagtggaagttataaaacgaaaatataaagcccctccaacagtaaccattcctataactgctattacggtaaaagaaattgatattatatgttgtatacttccgctgttaacgtaatttattgtcttctgtatttttctcttaaacaaattaagcatagtaaatcaactcaattctttctatactttgatggagatactccaaactgtttcttaaaaacataactaaaataattagcttctggatatccaactttttccgctatcatgtatgtcttatcatctgttgtattcaaaagtttaacggcttcttctaaacgtgttgctgtgagataatttacgaagcttgttcctgtttccttcttaaacattgtagaaaaatatgttggactaacatgcaatttagaacataatttttctactgaaacatcataatcactgtaattttcttttatatattgttttgctttttcaataagcatcatagatgaattgattcgctctcttttaatataactatttatcctaatagctttttctataatccattttttgacttcatgaatagaattaaaggattctaaataactgtatgcattaaaattttcaccaaaaatttcttctatatcaaatgcatatgtttgaacaagttttaaaagtgacgtcataatttccataagataaattctatattgattaaaaggcaataataaatcttctgttttcttaaacaaactatcaattgcctctgaaatttcatcctctgaagaaatttttattgcatttaacatcgatcgttcttctttctcatcaagttgtagctggattgaattatctggctctacatcatcaatataaatagcctttccagctcctaatataaatctataatctaatgcattttgtgcagttctatatgaaaaacgtatttgcgaaggattactataaacataccctattcctgcagatattgttaaactcataattctcttataaaccttacaaacctcatttataccttttataaataataatatatcttcctttttttcaaagttacccataactattaccataccagaataaataaaactaataaatttacaatacttacccatattttcatctacaattttcttaatagaaattggtgtaagtgctgattccttttgccccgaaaaactatttaagttttcttcaaaggatagtgttccatctgcctgaataatccctactgttaaatgcttatacttgaattctattcccagctcctccatttgttcatgccattgttcttcatttattctgccttcaattgcaccaactaaaaattgttctctaattactggtagacttttaatataatgcttataaagtgtttctaaatttcgtttttcgttatattcacgatcgagctgttcttttaacctcactaaaacttctatgagttctgctgagttaatcggtttcagaacatattcaactacatttatctttattgccttatgagcatactcaaaatcatcacatcctgaaaatacaataatttttgtagatggcattaattctaccaacttctttcctagttccaacccatccataaatggcattttaatatctgtcattataacatctggctgtagtttttctgctttttccaaggcatcttgtccattctcagcatcaccaacaactataaatccattggcttcccaatcaatcttttttatgattccaaggcgtatttcttcttcatcgtctacaatcataattctatatgaattcatttaactacctccgatagatgaattatttaataaggcacatgaaaataaataacaattagaactgccatgaatattttttattagccaaggagacaaattactctcatatcaggtctattagggcactttggcaataaattatgattaaaaaatactgacagatagatttgttattttttgattatgcctaaatactattatacattatgtattaaattattactagcacgagtgctaagtcttaccaatttgattattatttagaaaataaataaaatacaggcaaatctctagctaaaaaactaatgatttgcctgcattttatttatttaataattattttcttctgtattttgccatatctattgcaactgcaactgctatgatgataccttttataacttgttgccacataggacttaccgctataaattgtaatccatattggataacagtaaagattaaaacaccacttactattccaccaactttaccaacaccaccatttaatgaaacaccgccaacaacgcacgctgcgattgcatcaagctcataaccattaccatagttatttgttgcaccagctgttctagccgcttcaagtacgccaccaacaccatataaaagtgatgcgaagatgaatatacccataatagttgcaaatacatttactccagaaactactgctgcttcacggttgccaccaatagcatatacattcttaccgaatacagttttatttaaaataaaccaaactagaattataaatactacagcaattggaactagaattgatattcctgggaaacttccaatttgaaataattttgtttgtccaagatctataaagtcttgacgaataccaccaataggttgtgatttgtttggaggtaaatcaaagtatagagaagttacaccatatactataacttgagaagccaatgttgcaataaatggatgcatatcatattttgcaaccaagaaaccattaagaactccaaatatagcacatccaactactgctaacagtattggaatgataactgctaactgtggcatattggggaagaatctatttgcataatcagggttttgcaacattgaagttgatattacagctgcaagacctaccatacgtcctgctgataaatcagtaccagcaattaataatgtaaaacatattcctaaagcaacaatcatttttgttgatgattgtgtcaaaatatctagaaatacagcatattgcataaaacgtggttgaattatcataattacaactactagtaataataatgctataataatcgcattatctgtaaagaaatgttttacagtctttgatgaaaaaataacatccatgtctgcattcttcttatcccaaaactgttttgcgccataaacaagtaatgctataccaactccacctacataaattggtaaatcataaaatacacttggatctaaaataaaattaaaaacaattcctaaagccaccaaaaaagcaccaatacctaaaaatatttttccaaagccttttcgtgaaactatcttctctccactcatattacatacctcactttctttctctcctaccaaaatcatttgttataaaatttcatttatccaatacctagcatccgtaatattttcacctctttataagtaggataaaataacgactgcacacttaaggacataagttcaactaaaattcagctatggattaaccctacctgaattaagtcccacttgataaaggagatatttcttattgcataaattttgtagcaagattcataacttttactgaatctgcttcactttgatctaaaattccagtaaccttaccttcacacataaccataactctatctgacataccaagcaattctggcatttcagaagaaatcataataattgacttgcccttcttaaccaattcatgcatgatcgaatagatttcatacttagctccaacgtcaatacctcttgtaggctcatccaatataagaatatctggatttgtaagaagccaacgtgcaattaaaactttttgttgatttccacctgaaagattttgaatcaattgttccatgcttggtgttttagttctaagttcttgatttgactgctttgcagctttatatctctttgcttcttgcaaaactcctgctttagcatattctttttgacttgcaattacagtattatctagtactgaaagaataccaaatataccagtagcacgtctttcttctgttaacagtgcaaaaccatactcttttgcatctttagggatttttatttttataatcttcccatccttttctacagtaccagaggctacttcacgaagcccaaataaagcttcgactaattctgtacgttgtgccccaacaagaccacctattcctagtatttcacccttatgtaaatcaaagcttacattttggaatgattttttaattggagaacaaagattttctacccttaatacaacatctttacttggtgtatattctcttggtggaaatctattagtcatatcacgaccaaccatacgatttataattaagtctgttgtaagatccttagcatcccaagttcctacatactgaccatctctcataattgttacttcatctgatatcttaagaatttcctccatcttatgggatatgtatataattgcacagcccttattttgaagttgttttattatcttaaataaatgcttagtttcattttctgttaatgatgaagtcggttcatccataataataattttagaattatagctaacagcctttgctatttcaactaattgaagattagatggtgaaagtgttcccgctaatgcttcaggatttatatctaactcaatttcttcaaataattcctttgttttcttaatcatagttttcttgtcaacagcaattcctttcattggaaatctgccaagccaaatgttttccataactggacggaaacgaattgggtgcaattcttgatgtatcattgatacacctaaatccaatgcttgttttgaagtatttatctccattttctttccatctaatatgatctctccaccatcttcatgataaataccaaatagacatttcattagggttgattttccagcaccattttctcccattaatgcatggacacttcccttgcgaaccctcaatgttacaccatctaatgcttttactcctggaaatacctttgttatgttattcatctccagtacatattcacccatacaagcatcctccttttctaaataataattcagggatggggattttttataatctcgcatccctgacaatttctatgtcagatatatcttattttaaataatccttgtagttatcttgagtaacttttacatagtcaatccatacatattttccatcggttacatcaaatccaacattttctttattaatttctttaccttgagcagctgctaaagctatattaactgtagccttaccttggttttgtgcatcatttagaactgttccaagaagtgatccttctttcatagcttgtaatgctggtgctgttgcatcaactccaactactggaatatatttagatgcatcacctttgttatatccttcagcttttaatgcttctactgcaccaagagccatatcatcattgttacaaagaactgcttctatcttatcaacaccttgacctgtcataaatgctttcataaggtcagtagcttttgccttgtcccacattgctgtatcagcagcaagtttttgagtttttaatcctgcagcttcaatagcttttatagaatattctgtacgaagagtagcatcttgatgtcctggttctccttgaagcattacgtattgtaccactccatcatgatttttgtctgcttctggatgtgctttgaagtagtcagctataagttgacctgataaagttcctgattgttctgcatgtgcacctacataccaaaccttatcatagctatccatatctgctttttctggctcacgatttaaaaatacgattggaagtttcttagcttttgctttttcaatgataggacctgctgcagttctatcaactggatttattgctaaagcgtttacaccttttgtaataaatgtatcaacttgctcattttgagtaggttgtttattttgtgaatccactagttcaatagttgatcctttttccttagcttcaccttccatagcagtacgaactcctgtcatgaaagtatcatcaaatttatatattgcagaaccaattaaagtatttgaagatttagtacttgtttgtgcatcccctccagaacttgcactcttatttgctccacatcctgccattgttgcaactatagctgctgacattacaattgttaatagactcttaaaccttttcatttttacccctccatattcttatctaaatcctaaaacaaagactcaaatctgttcttcgtttacattactaattatagggattttatcaattagtctccatacgaaattcttcacttttttatcgaatttcttagatgttatagataaactaactataatctatacttatgcgtataccacaccgaaatgaataatatagtttatgattgtgttatctataaacaacatataacttatacttatgggataacttacctaaatcataaatattttgattccgaaaaactatgaaaatataaaaagaggatataaattcaaaacttatatcctccataaattatatgtataattatatttctatcaatgaaatttgtataagaataaaatcattatttctttcttacatcttcacgtttaaattttaaacttttgtaccatttcattaagtctttgggcgagctctgcctgactatgtgctgttagcgcaacttgctctatagctttagttgcctcatccatgctttctttgattgtagttacttcttcactagacttttgagtagtttgtgccatatcttgtacaacttcactaacctgacctacagtagctgttatctcttctgacatagctgcaatttcctctgacatcatgctgacgaaatttgaatcattataatattggtcaccggtttccatataagcattaaattgtctatgtacttcagtattaataaatgaaagtatgtcattgccagtatcaatactatttttaaaagcatcacgtactctatttattgtttcctgtatagacgttacagcttgtgatgactgttcagcaagtgttcttacttcttcggcaacaactgcaaaacctttaccttgttctcctgctcttgcagcctctatagctgcatttaaagctaatagatttgtttgttcagctatacttcctattgtatctgccataacttttatattatctactactttgccatcttcaataacttctaacattttgttctctttttctgcatatagatttcttgtttcttctatagcctttttaccgctattctttacctctgttgctttttctttggatttacttgaactactgcttccctccattgcctttcctgaaagttcattaacgcttgaatccacttcttctaccgatgcacttatttcctcggctgccgcactagattcttgcataccatcagaaatgtttgctatagcatcatcaatacttctagctctcaaagataattcttcagctgtagcagatagttcctcactcgacgcacttatatcttgagaattctccataatctctttaactaatatgttcacatttttttgcgccttatttaaagcaataccagtttgtccaaattcatcttttctagtaatggcaattggagttgaaaaatcatacattgctaatctctctgcataatctcttatcttccttaaaggcttatttatatgacttgacataaatattccaagtaaaacagcaattataaaacctacaatactcatcaaaatcataattatgtttgttcgcgcagatgataaattgatattatcacttgctacttttgctgccgttaaatttatttctataactttatcaaggctagcgagcatttcatcttctatgggtaaaaaaatcatgtactgtttcgtcacttcatttgaatcgtttagatctgctgcatctattatcctgtttcttgcatctctatattttgttacattatcagtaaaattcgtccaattttctttttcctctgcagtagtgattaatttctcatatttagctatatattcgttatcttcagttaccatatcggtaatgttcttttttgctttatcagtttcttttttattttgatcatacattataactgaaacttcgctctttatttgcgacatatttgattttattgacaagatttcattaacactctgtaaatttacactatacattgtttctgcatttttatttactctttttacttctattccaccaattgtgcctacaactgcaattaatatagccactaataaaaatgctgatattaacttagctcttacttggtttaataaattcatattaaaatttcctcccactgttaaaatgctattgcatattattttttctattactatccaataaagttttcataccatcttctgtaagcggtttgctaaaatagaaaccttgaattatcttacaacctaagtcagcaagtacttctatctgctctcttgtttcaactccctcaactattaccttgtatttcaagtcctttgataagttaactatgttctttattaataccatgttcttataattttctacatgatctacaaatgttttatcaatctttaatgtacttactgaaatattaattaaatagcttaaagaagagtatcccgtcccaaagtcatctattgcaatatttattcccatccctttaagttcatttaatacttctatatttttttctgatatatctaataaagtactctctgttatttctatctctaaaaagtttggagaaatattatacttattacagcattttaacaacttatccttaaaatctttttccttgatttgaattggtgatatattgattgctatattattaaacttgtaccccatgcacttccacaaactcgcttgctctatggatttttccattatccaatcgccaatttgaactatatctccactttcttcagcaataggaataaattctgctggtgaaacatttccaatcttatcattattccatcttagtaatgcttcaattccaacaatctcattggtagacaaatcaatttgcggctgatagttaatatttaattcatgtttattaatagcattctttaattcgcttctaatcaatgcctccctataatatttctcaaatatttcagtagtaaagagtgtataattattttttccagttctcttcgacttgtacatagctaaattacaaaactctaacaactcatcagaatttatgctatcatccgggaaagtagatatccccatgcttatacttacagaaatatctaattcagcatctgttatcttaaagggtactgataagtttttataaattttattgcaaatttcctctatttcacttataaatttaaattcatagattaaaattgcaaattcgtcaccatttaatctaaataatttaccttttccttgaatgcatctacttaccctttcagaaaaacattttaatatgaaatcaccaaaagaatagccccaattataatttatgattttgtagtcatcgatatcaatataaataatcgcaccctttctacaattaacttttgatatctctaaactcctattaagcttttcaaaaaaataactactattaggcagccctgtaagaatatcgtgttttgaaaattctttattaagcttactattttttctcttatgtatatccttatctaattttctttttatgggctttaccattttcatcttaagtttaagttcttttttgggcatattaattttaatcttattcataataacttccttttttaaattagtacaactaaacacgtgtaaaaactccccacctctctcctattatttaatagtaaaatataacatcttaaatactaattgttgcgtaattattctacaattttttaaactttgacttttcaaaaaattaaatatatcatttatttgaacataataaatattttgtcctattattttatgtaataatgtatttatagctctgcaaatatacaaatattgcatattaatgtgtcataagaatacaatttaacctatatttgtacattttttaagcttttttatacaatatttacatatactacaacttataatataataaaattggacaaaatatttattatgtatcattacttctagaggagagtgcatatgagggcatctaatgaaactgaaattaaatatttaacgcaaaaagaagtattatcactatttaatgcaattgaaaattctggaaagctgcattcaacacgtgatttagcaatatttagattagcttatagatgcggtcttagagcttccgaaatatcaatgttaaaattggaaaattataatattaataaaggagaaatatattgtaaaagattaaagggtagtaagaataatactctgcggctagatgagaaaactaaaagcgttttagacaaatacattactgaaaatgaaattacatctgaatctcaaactatatttacaagtcaaaagaataagccaatttcaaggcaaaccctagaccacctaacgaagcaatatttctcaatggcaagtattcaagataagtcaaagcaccattttcataccattaaacatactacagcagttcaccttgctgaatgtgatatggatataaaagagcttcaatggtggcttggccataaatctgttaccaatacagaaatatattttcaatttactacaaaacaacaagaaaagatgtatgcaaaactagagggaaaaagtgaaatggtataaaatttacttaattaattaaaaaagacttactttagctgctaaataactaaaataagtcttttatttttcatcacatatcttctttagattttaaacttttgtatcatttcattgagtttttgcgcaagccctgcttggttttgtgctgttaaagcaacttgctctatggcttttgaagtttcatctacactttcttttatcgtagctacttgatcgtttgattcctgcgctgtcgatgccatctcttgtactaacttattaactttccctacagtgattgtaatttcttctgacatgtttgcaatattctctgacattttacttacaaattcagaatcgctataatatatatttcctgtatttccataggcattaaactgttcatgcacctctgtatttataaatttcaatatatcatttccagtgttaatgctgttattaaatgcatcctgaactttaattatagtatttttgatagctgttacagcctctgatgattgttctgcaagctttcttacttcatctgctacaactgcaaatcctttaccttgttcccctgcccttgctgcttctattgctgcattcagtgctaataaatttgtttgttcagatatacttccaattgtatcagccataattttaatattatcaactatctttccattttcaataacaattaacatgttcttttgtttttcctttgataatttctccatttcatctatagactttttactattgtttttgacttctatagctctctctttggatctattagcattctggcttccttccatagcttttttagataaatcatttatatttgagtttacttcatctactgtcgtacttataattcctgcctcagcacaagattcctccatccctagtgaaatagtacttacagcttcatctatactcgcagcttttgatgaaagctcctcagctgttgcagaaagttcttcactagatgtacttatatcttgagaattttgaataatatctctaattagtttattcacattttcttgtgctttatttaatgcacttcctgtttgtccaagttcgtcctttcttttaattgaaattggagtcgaaaaatcatataacgctaatctctctgcaaatcctttgattttttttaatggtatatttatagcctttgatattagtgctccaaatataattgctaccactaatccaaagatagtaagtgtaatcataattttattagaattaatataagtagatgatatatcctcattagctgattttgcatcagatatatttatatctataactttatccaggctatacatcatttttgtctgtagaggaaccatttctaaatacctcttttttgcttcttctaaatcttctgattttacagcattcactaccttgtctctaacctgattatattccttcgcattatcattaaattccttccaagattttgtttcactacttgtcatttgtgatttttcataatcatttatatatttatcattctcattaagtgcagtaataacatttttttgtgcttcctctaccttatatttatctttttcatacatcatgattaatatgttacttttaatttctgtcatatttgattttatagataggatctcattgacatgattaaaatttctattgtacattcctgatgctttattatttacatttttcaaagacaatgctcctattattcctactacgccaattaaaattgctaccgtcaaaaatgataaggttaatttaaattttataggcaggcttcttctcaaaaacataacttttcccctctctaaatttataatctcgaccatttattaccctttttgcaatagaaaacgttttactaagatgttgaaattaacatatattgctaattattatgataatatttttaatttatataatcaactaaaaaatctactcttatatcgaaatgttgagtatttgctaatcatttttaactataaacttaattatataaaaaataataaagctatacacaagtctactttaactatgcatatagctttattaattaatttaatctatctaaaatctaaaatcacgttttccttcatgtaagttttcaagattttccaatactatcttcttaacttttccatttggaatatttggaatttcatttttaattacttcctcaccttttcttcgtgtatcttcagaagcataatcctctaaatattccttcaatgtcatcaatgcattaggttggcagcagttagctatttgtcctgatttaacaaggctcataaatctatctccagttcttccttccctgtagcaagctgtacagaaacttggaatatgacctctttcaagcaaccagtttactatctcatctaaagttctagtatcacttacatcaaattgtgctgagttttcttcctcattttccttttcaacatatccaccaacacttgtagatgatcctccacttatttgagagactccaagttcaagcactttttctcttgttttttgagattctcttgtagaaacaataagacctgtatatggaactgtaattctaagtactgcaactattttagcaaatatctcatctgaaatagcatttgtaaattcatctggatttatatcatcagccggtcttattctaggtacgcttatagtatgtggaccaactcccatggctgcttctaaatgttctgcatgcattaataagcctacaaaatcatatctatacatatttaagccatataatacacctagaccaacatcatcaattccagcttccatagctctatccatagcttctgtatgataagcatagtcatgctttggtcctgttggatgaagttcttcatatgtcttcttgtggtatgtttcctggaataagatatatgttccaattcctgcgtcttttaactttctataattttcaacagttgttgctgcgatatttacattaactcttctaattgctccatttttgtgttttatactataaattgtttctatactttcaagaacatattcaagaggattgtttactgggtcttctcctgtttctaatgcaagtcttttatgtcccatatcttgcaatgcaattacttcgtttttaatttcttcttgagtaagcttctttcttgttatatgtttatttttgtgatggtatggacaatatgtgcatccatttacacaataattagaaagatatagtggtgcaaacattactattctgttaccataaaatctttgcttgatttcttttgcaagtttatacattttttcattttcatcttctaattcgcattcaagtaaaaccgctgcttctctatgtgaaattcccttacactctttagccttttctagaatttcattaattaattctctattgttcttatttttcttagcaaactcaagagtttctaatatctcttcgttatcaataaattctgttgctatttttgatttaacattatacattactctactcttctttctataattggatttttaaattttgaatttaattcgttctgattaatgctttcttcatccaattttggcaaaggctaaaatattaattaaagctaatctacttattactatatttaatatttatttagcagttttagaatacattgtttttacatttattccttcgatcataccaagtttacctgataatgagcttattatatcattggtagcatctatcactacacttattatacccacattcttttctctgtaaggtatccccattctcccaaccatatattgcgaatattcatgcaaaatattgttgagcttatctgttgaattcatatcttccactataattcctatcaatgcgattcttgtatccatattctttattcctttcaagaagaaaatatttttatattcaccgtattaattagcaattactatttttcaattgcaataaaaaatccccgtgccacaaaaaggcgcagggatagcgtacatatctctatctataataccgccttgtcatttgggacgaaccctcatgtgtttcagaacgatcatgtgttaagagtctttcttcttgggatttccctttaaagtcagactacatatatattttatcataaaagtatattttagcaatagtcatcatttctataaaaaattaaattatcatgtttaactctttttttaactatctctttccagtaaaccatgtaaatactattttcaccaccttatctcgagaattcttccactataattatgtttatttctaatgattaaaatattcttaattttatttatattccagcttaaatctacgtcttcaggataccccatttttacagatatattttctccattaaatctttccaatggaatctctataatatcattttcactttgcatcctccataaagcaagataacatactctactacataacagtccatatgctatccattcatcgtccagagatggcatttttattggccaaaatggtattccatttggtatatcatgtctgatgcttttataatatttaattccttcttggatatatttaaaggattcattatttatttctgctaaatgcccactctgatgaattctacataacatagaatttaccatgttacatattacttcttctttatccccatctcgcaatggataagaccaaactgcacattgttctggagtaactaaagatggtaccgctgctgcaattgctgcattttttctataatctgtttggtcactgcttgattgtatactatgtctttgcaatagggcataatccattctaagtccaccactaccacaattctcaataactaagtcaggatatcttttaaatatttcgtctaaccaagctaaatatgctctattatgacctaatagtccttcacctgcactatcagctttgttatcagtaccaatccccatattaatattataatccatctttatatatccaacaccatactcttctacaactctctttataattccagttgcaaactttctaacttctggatttctataatctaattgatatcttgaatgatcctttattctctttccatgcctcataaagaaccaatcatcaggtaatttgtctgctaatgaacaatttatccccattacctcaagttcaagccaaagccctggaatcattcctttctctcttatatagtctagaggttctttaataccatttttaaatctctctttagatggcagccattctccaacaccatcccaccaaggtccatcactataccatccacaatctatgcaaaaatactcacaaccagctagtgatgcagcattaataagaggaattagtttttctgtagtaggatcaccagataaacaattcatataatcattaaaaataactggtaatcttttattatcatcattttctcttcttattctacgcctatatttagtcataacttctattccagcttgcaatcctccacttatgcttgtaactgcgacttgtactgtttcaaagctttcattgggttttagttctttccagaaatgattttctgcttctgaaggtccgcttaattttaaatatagcatatgcattatgtcactaatttcccaattccatgagccattatgctctatttgccacatgtaaccattacttatttctgtattttctataaatcctagaggcgcatactgacaggttgaccaatttcctgtattagaaactaacaatctatttgttgattcgtcttccacatggaatattccaacatcttttaatgaatattgttcccacattccttcaccacaccactcattatgaggaatatatatcttcattttattttctctgtctaatactccgcctctatcaataccagttaaagtaaatgaggttatatactctattccaacacttctttcacctttattttctaaaatgctccatgttctaacgatttgtaaatcattataaaattgaaatattacttttgcttcaatttttgtaatattgtcaactaagttaatagtaattcttcttccttcttttagaatttcatcattatgactctcataaattatcctatgtccgggcagagttcctgtatgttttactcctctatgatttaattgattttctcctgtaaattgcaattctaataatctacatttttctttttcatcttcacttaatttattaaactgttcaaaaggaagatatgaaaaatgtagcaatcttatatctctatctttagttacttctaatacaatatttaaattattctcattaatttttatatatttactcatctatctttccccatttcctaaacatgctccctaaaaaacacaatagagtaattaatcagagatgcttatttccttatctagtttttagatccttcatactctacatataattatcattcgcattccatcctgttattgtgtataaattactatataaataagcagtagataaaaaatcacgattaacttgcatatctactgcttctaaactaattatttatttcattcaaatgatatattgctgaagtgaaatctccaccatgttcgcaaaaatcttctgatcttactggaattccagcaaacattaattcgtctccaaaaaaagattcttctttattattatttatataatattttttattttcatctaatccttgtaactttatcctcttaaaaccttcattagctgtgttaagtattttataataaccaactattgcttcggatttatcttctgagacaaccatccaagaatttaatttattttcaaaaggacttataagcctataaaaagttcccttttgtattaattctctattttctttcataaatttaacttgtttcttcacaatcgttctttcttcttcggataaatgatttaaatctagctcatatccaaaagctccaaaacaagctacatttgctctagtttctagtggcgttattctaaaaacttgttggttcggaacttcagatacatgagcccccatgcagcttattgggtaaacatatgaagttccatattgtattttcatacgttcaactgcatcggtattatcacttgtccatccttgtggtgcataataaagtattccggggtcaaatcttgcaccaccactcgaacatgattcaaataaaatgtgtggaaattcagatgttaatctttcatataatgcatacactcctaaaatgtattcatgcattacttttccttgattttccgcaattgtagagacactgtaacattcagttatatatctattcatatcccactttacatatgatatcgatgcctctctgaatacttttgacattgcattatagatataatttactatttcctttcttgaaaaatctagtgtatactgatttctacaatgggatgccgtcctatttggtgtatggataatccaatctggatgagctctgtataaatcactatctttatttaccatctctggttcaaaccaaagtccaaatttcatacccatgttttctatcttctttgaaagtccaactattccatctggaagctttttagtatttacataccaatctccaagccctgctttatcattatttctacttccaaaccatccgtcatctaacacaaatagctctatgcctaattcacttgctgtttttgcaatatttaatattatctcttcatcaaaatcaaatgttgtagcttcccaattatttattagaattggccttgccttatctctccaatagcctctagcaagtctggttctatataatttatggtaagcctgactcattccatttattcctttatcagaataggccattacaacttctggagtttgaaaactttcatctttatttagtatccattcaaacatacttggatgaattcctaacataattctagatgtatcatgagtatcaacaagaacttcacccaaaaaatttccactataaactaagctaaatccatacacttcgccctcaaactcagttgtgcttggtctcttcaaggctataaatggattatgctctgcactacttgtccctcttaaactgtaaattgattggactccatggtctaattttttatttcttatatgtctttctctactccaagctccagaaaggtgcaccatttcgtaatcataatctggtaaatctatactacaactcattgcctttgttaatataactttatcttctcctttatagataaactttgcatttcttgttattatcgggaaatcttcatatatggtgtaacttaatactaatcttgtactaatcaaatcatcatataatattatttctaaagtttgtgcttctttctcattttccacataggtagctggaagttgttctaatttctttttaccttgaaaaatattataggattgaaattgaaaattagtaattttacttccattttcctgctttatttcaaatgcaggataccgaaaatctgttgtcccataagaaggatattcctgcctagtatgttgcagcgaaaagaaagtatcgccttcaaatacatatgctgctaaaggacgcatccccccttcaaaaagatatgaaaatgattctttatgatgtatcctcttcccataatataaatttcccagctcattattatctagtatttttatgatataacttatctctttattgtataaatgaaattcctttgattttgcgttaaatttaattgccatataactactcctccctatgtatttctgcaaattatctttgttcattaaagttaccggattaaagttttccacctgaagttgctataccctctataaattgtttttggaatacaatataaattgcaagcattggccaaatggcaagtacagacgcagccatcaattgaggataattaacagaatatgcactttgaatttttgcaagtgccgatgataaagttgcggaatcagcactggaattaataattagcggccacattaaatccttaaatgcaaataatgctgtaaatatcccaagtgcaaccaggccagacttagttaagggtaacataacttttaaaaaggtttgtcctacattgcagccgtcaagccttgcagattcttctaattcttttggcaatcccataaagaattgccttaacaaaaatgtaccaaatgcacttacaagtcctggaaaaagaagcgcaaatattgaatttctcattccaattttatctaccatcaaatattgtggaattataaaaagttgaactggaaccatcatttgaaataacacaattccaaataaaaaatctcttcctgggaattttaatctcgcaaaggcataagctgccatagcgctaaaagccactgaacaaaatatccttaaaaacatcattgcaaaagtattaaaatataatataataaaattgttttgtcttattgcttcaaagtaattctcaatcttccactctgatggaaaaataacatatggattcattgaagtagactctgatacagttttaaatgatgtaagtatcatccaaacaaacggtaatatcataattactactccaagaaataaaaataagtgtataaataattttgaagcatctcttttcattttcataatatagttcccctttctacatgtaattaacccatttcttctgtgctttcatttgaaatactgtaattatcataataatagcaagaagtaacattactatagctgaaccatatcctttatctgcatacttaaatgagctattataaaataaataaactaacgatactgtcttatcatatgcaggactagcgacatcgatcatcatataaatgacatcaaatacttgcattgcctgaattatactagtaacaacaacaaaaaataaggttggagacacaaggggtaatgtaatattgaagaattgtcgtactggttttgcgccatcaatacttgaagcttcataataatcctttggtatttcctgaaggcctgctataagcagaaccatactatatccaactgtgctccatattccaataatagctatagaataaagagcaatattaggattatcgatccaatctacaggtccaattccaaatttagatagcatatgattaatgagaccaaattgattattatataaccatttccaaaccattgttattgctgctggtgcagcaaccattggaatgaaatatattgttctataaataccttttcccttaatcttggaatttaataatacagctaagaccattgctattattactgttactggtacaactataattgtatattttaaagtatttcctaccgcgtaccatacttggacatctcgaaacatcttttcatagttacttaagccaacaaatatatttccctttccaaaatctccactcttgaagaaacttaaatatagggtttcaataataggaataatattcaatattataagtccaataatagtaggagcgactaaaaaatatgcccatttccactcattaactgttcgttttgatggttttcctatatttactgttatattttttgtcatatattcatctcctatcatatttattttaaagattacggcaacatttttgctgccgtaacaataaataattatcttatttttcctcttttagtgcatcattcatcattttagcagtatctttacaagcatcttccactgtcttttctccagtaaatgcaccttttaacatttcatatgccttatcttcccatttcgcagttgtattagaatatggtcttatttgtgcatatttaaccatatcaacaaagcattttatattaaatgttttgtttgaatttatccatgcatctgctgtaccattatacgcagaaattgcaactccaagttcagcttgctttgtctgtccatcttttgagcttaaatattgaacccatttccaagcctcttctggacgctttgtattagctgaaattgcatttccaagtccattgaagatactagctctctttccatcatttgctgaaggtaatactgtaacattaaaattcttagtcatatagtcatttgctgcaaatccacttaaattccaagaaccaaagaatcccattgcacatagtccattttgtagtgtctctgcacgtgctgcatcatcaaaaattttaggtgacaatccttcactaacaaatctcacataatatttcattgcttctattgtcttagggttatcatatcctgatactttatcatcagttatgattgttccgccattttgatatacaaaattataatatccttcttgattgtgtaaaggtgctaggaatccatattgctttccatcacctgttgttaatttttttgctgcttcgtatagcttatcccagttccatgtttcatcagggtatgaaataccagctttatcaaacattgttttgttataccaaagacctatagtatcataatcctttggaatagcgtattgtttattattcaaattatatatcttcaccaacccttctggataattagataatttcacatcatcacttttgttaattttatctgttaaatccataagcattccatttgatgcatacctataaatttcatttgaatgcatccaaaaagtatctggcagagatcctcctgtagctgccgcctctaacattgtccaataatcgctccaacccgttacttgtatatcaatttttatccctggatttttcccctcaaattcatctgccattttcctaagacctttttcctgattagaatcccaaattccataagtaatgtgtacatctcccccactagatcccttagctgtgtcttgtccaccagttgctgcggaatttgaactaccacacccagcaagtcctgtaacagccatcatactagctaagattaaagaaacaattttctttttcattaaatttccctcctattttgtacatattcgattttgtaaacaaatatatttttaatatgtagtttgtaatactaatattaaaatcacattcatcattttaatttgttcaaattataagcaaatatatatattattatcgttaaaaggatttaagtaaagcttttcaaaaattagctaaaaacgaattatatagaatttctatataattttgttgttttgcacatcaggtgctattactgcagtataaagcgttctttggactttattcactttctataattaaatattatcattaaaaaattccggaatacatagaataaacaagctaataatatatacttttgctatattacttagttattgttcaactataaacgcaaaagtatatattttatgttataatggaagaaaatttatccatttaacgttttcaaaaggaggtataccatttggccgattttaaaagttatatttttaataacataaattatgtagatattatactttatcaatttggctcagaacgttgtgatcccctacattcatttggccccacggttaaaaatcattttcttttccattatgttttatctggaaaaggaagactctactcatttaataaaggaacacaaaacgactcctccatttatactataaaagcgggggaaggtttcttattaaccccaaatataattaacacttatgaggctgataaagatgatccctggaattatgtttgggtagaatttgaaggcttaaaagcccaacgatatcttgaagaaataggtctatcaagcaaaaatctaatttttacacctaaagaatataataatgatgataattctataaaggacaatctaatgtttttattaaataacccaagtgctcctgattcagctattttaggtcatctttatttattcttctatgctctactagaaaattcaagttttaataacaccaaaagtgctagtaatcttcaagaattttatgtaagagaagctataaattacattgaaaagaattataacaataatatttctgtcgaaaatatcgcaaaatggtgtaacttagatagaagttactttggtaaaatatttaaaaactctatgaaaactactcctcaggagtttttaattaagtataggttgtctaaagcatgcgaaatgttgaaggataataatatatctattagagaaatttctgaactaactggatatccaaatcagtttcacttttctagatccttcaaagaagtctataatatgtctcctaggcaatggagaaatcaaaataaaactaagttataacttcttctatattcaaaaaataagcaagctttacattaactatattaactaatgcaaagcttgctttatatttcttattttattaaatattttcttaggattatctactgatatcattcatctaaatattttatgtaattacattctcataaatcaaaatagctaactgtgaaattatataattaatattttataatttagcgttagtagcaaattacaatcccaccatcatcagcataaacagtacttaatccgcttccttcaaaaattattatatcttcaaagttatatttgttttttatttcttccttaagcttttctgctttttctcttgcatttatatgccctattcctagaaccttatttttaaaatcgctgccttcttcacctattaggtctattagtctattaaatgcctttttcttccctcttacttgctcttttagcacaatttctccatcattagcagtcataattggagtaacttgcagaagtgatcccattaaagcttttgcactgcttattcttccattcttaactaggttgtccaatttatctaaaacaaataacgtcttcatattttctatgtattcagtaacttgctctacaatctgagaattatgtgctttttcttcaattaacttttttatttttaaaacaactagatcagccccagatactgctgtcttacaatcgaatacatgaacaaaactttccggaaactcttcttgaaacatttcctttgccaatatagcactattatgtgatccacttaacttaccagaaatggttacaacaaaattatttttacacttttttaaagcttctagaaaatcatgtggcgatgggcatgctgttttaattttgtttttgctgcttttcattttttcaagtagatcatttatatttacattcttatcaacaatttcttcatcatcaataataattttaaatggaattctttccatatactcttcatttccaaaaacttcattattaaaatcaacacaactgtctactattattctagtattcattttattcctccatctttttcatttgtagttctaatactttatctataaacttatttaattaataacgcttgcctaaattaatatataattatccactaaattatatattaattttactattattagtagttctttttttcttaacatatatattgaaaaagtaatccttcattataactctaaaaatattacaagaattttagccgtaattgtgaatcgttgaaatgtgaattgtgaatttcaacacatataaatatctaaaaataaattattataagtagtgctatttaatacttactcttaactatatatcttttaaagcatacgtaatagtaaaaggcaagttctgcactctatataaaatatttagtgcaaaacttgccttaacctcatacattttctttttcttaatttatttaacacattctattaacacactatgttttaaattttgaagaaaccatttcttatattactgttatatttatttctttttctttgaatataagtcgaatactacagcgaataataatacaaatcctttgatagcttgttgccagttattatcaactcctagtaaagacataccattattaagtactcccattacaagtccaccaacaactgctcctaaaattcttccagtaccacctgctgtagatgcgccaccgatataacaagctgctaaagcatctaattcgaagttaacaccagctttaggttgtgctgagttaacacgtgctgcataagctaatcctgctaatgctgccattaatcccatatttacaaatactaagaatgtaattttatcaacgttaacaccagataaagctgctgcttttttattaccaccaactgcatatacttgtctaccaaatactgttttagtagtaatgaatgagtaaattgctattaatactcctgctattattaatatatttggtatacctttataagatgctagcacaaagcttccacccataattactacaactgatattatatttttagcaaggaacattgaattatgatcaacattgaaattatatttttgaagtttctttcttccttttatattattaaacaccatgattgctgatagtataacacctatgatcattgctgatcctactaaataaatatcgcccattttaaagtagaatagtggaggtatgaatccagatcctaagttcgcaaattcatttgggaatggagcgattgtcttaccatttaatattatcattgagaatcctctaaagattaattgtcccgctaatgttacaacaaatcctggaattgctttatacgaaatccaatacccttgcacagctccaacagctgcacctattaaaagtgatacaacaacagatactacaggattcattcctttattaaccataagaacaccagctattgctccaacaaaggcgcacacggaaccaaccgcaagatcgacagtacctacaataactactaaaagcattcctactgcaagaataagtacgtaaccattttgctgaattaaatttgttatgttaagtgattttaacataactcccttagttaaaatcgagaatataactactaccactaataatgcaacaagcataccattgtctttcataaatttattaaatgtattttttgcaacttttttttcttcaactcttgcttcactcattttactacctccctattttgatgcaacaattttactcatgataacttcttgagtagcatctttcttatctaattctccaataatctttccttcattcatgacatagattctatcacttaatccaaggacttcaggtaattcggatgaaattacaataactgcttttccttgagctactaaatcatttataattgtatatatttcatatttcgctccaacgtcaattcccctagtaggttcatcaagaattagtaaatctggttctgcataaacccatcttgaaagtactactttttgttgatttccaccacttaagtttcctgtaatttgtaatatacttggagttttgattttcattgattttctgaattcttctgccgctaaaatttcaacttgttcatttataacaccattattagaaatcttacctaatgaagctattgaaatgttatgacgaatatcatcaatcaggtttaaacctgcttcttttctatcttcagttacgtaagcaatacccgcattaattgcatctttaactgttttaatatgaatttctttaccttcttttaaaatgctaccagaaatcttttgtccatatgttctaccaaaaatgctcattgcaagttcagttcttccagcacccataagcccggcaattccaagtacttcgccttttctaacttttatatttacattatcaaccatttttctatccggataatctggatgatatacattccaatcctttatttcaaacatcacatctccaattttaggagttctttttggataacggtctgtaagttcacgaccaaccatccctttaacaattctatcctctgagatttgccctccagaggcatctaatgtttcaatactagctccatcacgtagtactgttatagagtcacatactcttgaaacctcatttaacttatgtgaaattaaaatacatgtaattccttgtgattttaactctaacattaattttaataaattttcactgtcatcctcatttaatgatgcagtcggttcatctagaattaataattttacgttctttgataatgcctttgcaatttcaattaattgttgtttaccaacaccaagtgtgttaactattgtatctgggtcttcatctaatccgacctttttaagtaattctttagttctaattcttacctcttgccagtctataactccatgacttgcaatttcgtttcctataaatatattttctcctatactaagatgtggactcaaagctaattcttgatgtataataactattccatctgcctcactgtcttttatgcctttatatttacatgcctttccattatatagaattgcaccttcgtatgatccgtgaggatatattccacttaataccttcattaaagttgatttacctgctccattttctccacaaagagaatgaatttctcctgattgcactcttaaattaacattatctagtgcttttacaccaggaaatgtcttagttatatttatcatttcaagaataatatcattgtcttttaacatacgtcacgcccctccttatttgaatgatagtggaacaaagttgtccgcactatcattactgctgttaatcttatttagaaagatctgcttcttttaaatatcctgaatcaattagaacttctttatagtttgttttatctacagatacaggttgacataagtaagatggtacaacttttactccattgttgtaagtcttctcatcattaacttcagctttttgacctttaatagctgcatcgattgttttaacagcttgagctgataattttcttgtatctttaaagattgttgatgtttgctctcctgcaattatagatttaattgaagctgtttctgcatcttgacctgtaattactggccatggaagatcccctgaaccatatccaacacttcttaacgcttctacaacaccacggcttataccatcataaggagctaatacagcatcaacttttttaccacctgagtagttagcagttaatatattttccattcttgattgtgctaaagctccatcccatcttaatgtacagatttcatcaaatttagtttgacctgaaactacagttaatttcttagaatctatatatggttgaagtacttccattgcaccttcaaagaacatatgagcattattatcatctggagatccagcaaataattctatgttaaatgatttttgtgcattttttaaatctaatttcttttctatatattgacccatttggtttcctacaagtttattatcaaaagaaatgtaatagtctacatttgcagtatttttaattaaacggtcataagctataacaggaattcctgcatctttagccttttgacaaacatcagttaaagattcaccatcgatatttgcaattactaagccactaacaccttttgtaattaagttttctgcttgtgatacttgagtttctacaacgtcttcagcatattgaagatctgtattatagccaagatcttttaactgttttaccatgtcatttccatcatttatccaacgttcagaagatttagttggcattaaaatacctattgtttttccgcttcctgatcccccgtcagtttttccctgtgactctgttttagaattatctgcatctgagtttggagcactagttgttacactacatccaccgatagaacctagtaatgccattgataataacatagccattaattttttcttcataatattttctcccttcaacttcccatataataaattataaatttatattttcttttaatctgcttaatagttatcatttctgataaattaaagtggactaaaagttaatattctaaattattaaaacaacataatttttttaatacacttataaccaaaaatcaaactttattaatacgttttcatcaaattcagacatgttcttatttattttgacatattataagttaactcaagaataactaatatagccatagcattagcatatttactactaatattgaatttatactctggattctttctcttataaatcattggtattcctactccaagcaaaatggctaatccaaatatagctagtacaccaaaagaagaagtaattattcctgaatcgatagaaataaaatatagtaataagccaggagctactagatagtataataatttgttacataaagtaatgtgcttttcattcataaaattcctcccctatcctagtaaatattattgtttaatgtttgattgatattattcatataatttgaatatatatcatggaaaatacattttcctatatatgctctatgatatatatcttgtaagtacatcaatattcttctttattatcataataaaaatttacattaacatttatttatatatgtatcctgcttgtacaaattgagaatagcctatcttgtcacttctatctgatacacatactctaactcttaatgtgttataattttagaagaagtacttgttaatatgttgtacgtacttcatgtatttattatatatcgttttcatcactatagcaatagttttttttatattgtatgtacaattttattatatttctttaccaatgtgcatacatctaggattcgttgcaataaaatgttcaattttaacttgttaaactagaaatcagagcatgctaaagtatatataagctgattcttagccgcttcaatgatatttttacaatctttatgaatcgaaatatctataattgaggtgaattataatataaacacaaattgtatattttttatctattcctttattatttatagataatagataataaggttgaatcctttttattgaattcaaccttattaatcatactttctatttaaggctatctatcgctgttctttcaatagcaagcccactagtgtagcgttttataaattcattaaatccttcaacatctttagaatctggatttatttttgtacctatttgtcctgcaaacactttatttgtaagataatcgtctaatgtctcattttcatctttatttatcatataagatgcaagtactgcaattccccacgctccgccttcggcagcagtttccatcacagaaactggtgcatctatagctgctgccattatcttttgtcctacacctttagtcttaaataaaccgccatgtcctaacatttcatctaccttaacaccttcctctttaagaagaaggtccaaaccagtttttagtgctcctaatgatgtaaataaatgtacacgcataaagttagctagattgaatttactctctgctgaacgtacaaatagtgggcgtccttcttcaaaaccagttatatgctcacctgagaagtaattataagctaataatccgccacaatccaaatccccttcaagtgccttattatatagagtcgcaaataacttattcatatcaacttctacaccaaatgcctctgcaaattctttaaataatccaacccaagcattaagatccgaagtacagttattacaatgaaccatagctactaaattaccagtaggagttgtaactaagtctatttcttcatatgcttttgataattctttttcaagtacgatcatcgcaaaaacagatgttcctgctgatacattacctgtacgctttgcaatactgttagttgcaaccattcctgttcccgcgtcaccttctggagggcagaatggaatacctgcttttaattgtcctgtaacatctaaaagctttgcaccttcttcagtaagtacacctgcattttctccagctaacaatacctttggtaaaatatctccaagtttccatgaaaaattcttaggagctactaactcatcaaattgatcaatcatacgtgcattataattctttgtatctatatcaatagggaacattccagatgcctctccaacacctataactttttcacctgttaatttccaatgaatatatccttctaaagttgtttgaaaatctatatcagccacatgttcttcaccgtttaatattgcttggtaaagatgagcaatactccatctttgagggatatggtagttaaataattttgttaattcttctgaggctttttcagtaatagtgttacgccatgtacggaatggtgctaaaagctctccctctttattaaaaaccatatatccatgcatcatagcactgaatccaattgcgcctattgtttcaatagtaactccatatttttctttgacatcttcagccatcttcttataactatcttgaacaccggtccagatatcatctaaaccataagtccaaatattattaacatatttattttcccaatcatggctccctgaagctattggagtattattttcatctattaaaactgctttaattctagttgaacctagttcaataccaagcactgtcttaccattaataatggcattttttatattactcatctctaatcccataaaaacctccactacgtgtaatttttttaaatcgtttacttattatgtgataaatttatattattattatagttaaattaaataaatcttaattttaaaataatttctaatctcttctgaatatcattctattgtaatattactaaacctaatacaaaatagctcttataatcacctaatgtccagccctcataccgttaccgtccccagcttaatgtaagatcggaatgcaataatgactagacattagatgaatgattttattaaattctaaaactgcttcattgtcatattaatttatatacatttattaaaaatctataaatatatttctaaccaatgatttattattttaattacattatttcacactaatcttttcacacatctttatacatatcttttaataattttaacttttataataatgaataaattggttttaatatatttatagattaattaatttacacacttttaatctagatcttttttatatctgttttgctatatttattaatattttaaggttaaatctatttttctaaagttttactataatcactaaatttcctctactatatcgtagatttaattactgtaacttctatttctttgctacattaatagccttttcaacaacattttcaacagtaaatccaaatttctcgaataggatttctgctttacctgatgctccaaaagtatctaaagatataacatctccatcaagacctacatatttgtgccatccaaagcttgttaatgcttctactgcaactcttgcacgaactttatttggcataactgattctttataagcttcgtcttgagcatcaaataattcaaatgatggcatactgataactcttgcatctatacctttagcttctaattcagctgctgctttgtagattaattctacttctgatcctgatgccattaaaagtatatctggagtttctttcttagaatcttttaagatatatccaccctttaatgctctcttaggacatccatcatatagtggtaacttttgtcttgttaatactaatgatgttggagtagttccattagttacagcgtaataccatgctgctgcagtttcttttgaatctgctggtctaaatactgtcatgtttggcatacttctaagagctgctaattgttctattggttcatgagttggcccgtcttcccctactccaatactatcatgtgttaatacataagctactggaagattcataagagctgataatctcatagcacccttcatgtaatcactgaatacgaagaatgttgcacagaatactttaagtcctccatgagcatacattccgttagcgatagctgccatagcatgttctctaactccaaagtgaaggtttgatccacttctatcttctgctgagaaatctcctctgtcgttcatatgagttttgttagatggagctaaatctgctgatcctccaataaagtttggaattagtttagccaatctatttatcattattcctgaagattctcttgtagccatttctttatcaaagctccaaagttcttcattgtttaataaagcttctttatcaagttctccactcatccatttagtatattctgctgcaagttctggataagcttttgcatatgctttgaataactcattccaagcttcttctgtcttttcgccttttgctatgtgttcattcatatttgtgtacacttcgtctggtacgtagaatgcaggctctgtcttccatcctaagttttccttcatagcaattacattttcagcgcctaaaggttcaccatgcgctgaagcttttccttgttttgctggacatccaaaaccaatttgatttttaactattataatagatggttttgttgtttctgctttagctgcttctattgctttttctattgtatctatatcatttccatctgctacatttagtacttgccatccataagcttcgtatctcttagctacatcttctctaaatgctatgtctgtatttccttcaattgaaatattatttgaatcatataatacaactaattttccaagacctaaagttccagcaagagatgacgcttctcctgagataccttccataaggcatccgtctccaactatagcatatgtatagtgatcaactacgctataatctggtttattgaatttttctgcaagatgtgcctctgctatagcaaaacctactgcattacaaataccttgtccaagtggtcctgttgttatttcaacaccttttgtatgaccaaactctggatgtcctggtgttaaacttccgaattgtctaaagtctttaatatcttcaactgtaagtccatatccaaataaatgtagcaatgaatattcaagcattgaaccatgtcctgctgataatacaaatctatctctattatcccattcagggttctttccattatgattcatctttgcccataatgtataagccattgtagccgatccaagtggtaaccctggatgtcctgattttgatttttcaatagcatctgctgataatactcttattgcgttaatagataatttatctaattctctactcatctttatcctcatttcatagacatatttttttataagtttttagttgtgctaattaagtcccatgctgcgcttcgaattcatttcaaacctgaaataatcttagctatccttcattatcttttcaaaaggttactattttatcacaccttttgaaattgttttatgttttcatttataaattcttatattcttaaattcctatattctttcattcttaacttcttatattcttaagaatatatatttttatctctgtcatttggaacatgaataaatcataaatgatagtcatacttttgaaaagtattttatcagaatatttatccgtaagcatttatgcttttctaattccaaaatccagccattatacatctaaactactcttgtatttttaaaatgtatcccatagatattaatctttatattattgccatacttcgaaaaatatctaaatcagaaatgatggtcatgcttttgtggaagcgttatatcagatgatttagctgtagacatttcttcagtagaagttgttctatttatgcttgtccttagcttgtcttaggagcatgcataaatagtgcaacttctgctgttagaaattcacggctaaatcatcaataacctaaacaaatgcatgatcttcatttcgacggactattttccaaatgctgctgcccagtctgctttgaatctttctaatccttgatctgttaatgggtgttttagcatttgcattactaaactataaggaattgttgatatatctgctcctgcttttgctgcttctattacatgaattggatttcttacgcttgctgctattatttctgtttctattccatgaactgcaaatatttctgctatatctctaactaaatccatacctatcattgagatgtcatctactcttccaaggaatggacttacatatgttgctcctgcatttgctgcaagtaaagcttgtgttgctgagaatattaatgttacatttgttttaattccttcactagctaatactttagttgcctttaagccctcagctgtcatcggaatctttactatcatattcttatgaatcgctgcaatttctcttccttcttttatcattccttcagcatcttcacttacaacttctccacttattggtccatcaactatttctgtaatttcttttattacttcattgaagtctcttccttcttttgctattaatgatggatttgttgttacaccacatattactcccatttcatttgcttctttaatgtgttctacatttgctgtgtctaaaaaaaatctcatttccctaacatctcctctttatatattttgtttgttatttagcaacaaactattatttgcatatttaccttccatttaatatttatgtttcataatattaaatttagacattttcttttttaacttcaattttatacgtcactttttaattcatacttattaaggagaatttacaaaggagttccaattgctgattaaaaattctccttaaaaatatgttggtttatactatgatatcttattgtccataatatgcattcgcaccatgttttctaagataatgtttatctaaaaggtgctgtttgacaccctttacatctttgtttaaagtcattgtcttatatgccatttcagcaactttatctaatactactgcattgtaaactgctgaattagcatcttttccccaagcgaaaggaccatggtttttaactacaatagctggaacttctaatggatttttatctccaatagtttcaactattacatttcctgtttctttttcatattctccactaatttcttcatctgttagatcccgagtacaaggaatatccccataaaaataatctgcatgtgttgtcccaaaagctggtatactcattcctgcctgagcaaaagttgttgcccaatctgaatgagtatgaacaacgcctccaacactcggataagttttatacataactaagtgagttggagtatctgttgaaggtttatactttccttctacaacatttccttctaagtctacaactaccatatcttctgctttcatggtatcataatcaacaccacttggttttataactactaatccagtttctctatcgatttcactaacatttccccaagtgtagattacaagaccttttctttgaagttccatattagcttcataaactttttcctttaatttctctaacatttaaacacccctatctgcttgttgtatctatgtacgtacaagcgtacataaaaaaataatatctaaatatatatcattaaagtttatctttgctccagtaactcaaaatcaagtcatctaaagcaaagataaaatttaaactctagaacaagaatctctaacaataagttcagcactgtatgtgtattgaggcttatctattcttccctcaatcatatctataatgcatttggctgctcttattcccatttcttctttcggatgctttattgttgtaagtttaacacctgatgaaactgctaaactagaatcatcaaaacttactattgataaatcttttggtatctctatattttcttttctacaattatctattaccttcaaagcaaccttatcattatagcaaacaattgcggttggtttttcttcaagatttaaaatcttctttataaactggtctatatacatctcttgattatcagttatatattctcctactatacttttgttaaaactcaagtcatattcgtttagggcctttatgtaaccccttcttctcttttcaccttgtaaatcatctgctttaaataatgcagctatgtttctatgaccaagttctaataaataattagtgagcttgtaccctccctgctcatcatctactacaatatatgcagaattttcttcatcacaattagcatttatcgcaatatattttatattgttcttttctaactttttaatgctatcatgatgcaggttatttattgtactttgtgctggttcaactattagtcctgatatatcttggtttatgatatcctcaaaacatcttctttcattctcaatgtcgttgttactattaaataataataaattatatcccttgcgtcttaattcttcctctatacctgatataattttaggaaaaatataatctgatatataagttgtaagaacagcaacattttttttaacttcattagtttttttgttagagtaaaagcttccttttcctctttctttgtatatccagccttcttgtactaaataagtaagagcttgtcttacagtatgcctacttacattaaataagttggctatttcattttcggaaggtaattggtctcctgctgaaaccttgttttcttctattaggctgatatagtaattttctattaattcgtgctttgtttcagcttctttcatccttttcaactactttcatcaaataactatgcaataactccttaaaatataaatcgatttctttaaaagtatattttaaaaagttgtacgcacttgatgatttgattatatctctattccctatatatatcaatagttttttctaaaatttatttaaacaccaaggttaaccatacatcatctactttaataatttttatcgtaatctcaaatataaatttcaccgcaaggctgtctttacctaatttaaaccataataatgtttatctggaaagttaatattttttatttttttgattttacatcttgtatgtacaacattattgtattataataagcttgtacatacatcaaaaacttgtttgtactcatgaaaaggtatactaaatttagataagcatttttatttatccaatagctagcatccgtagtactccatcttcttaagtgagagataacggccgcaagctcctggactaggtgccccttaagggtataaattcaaggtggagttaaaattccacttaaaaagtttcactttatatattaggaggaatgttaaatgttaaaagtaaaaaattatgaattttggtttattacaggaagtcaacatctatatggtcctgaagtaatagagcaagtatctgataattcaaagataatagttgatgaattaaacaaaaaggatttaccttataaaatagtctttaaaacagttgctactgattctccttcaattagaaaagtatgcaacgatgctaataacgatgaaaactgtgctggtataattacttggatgcatacattctcaccagctaaaatgtggattcatggtttaactgaactaagaaaaccattacttcatctccatactcaatttaataaagaaattccttggggaacaattgatatggacttcatgaacttaaaccaagcagctcatggagatagagaatttggatatattggagctagacttgacatagctcgtaaaatagtagttggtcactggacagatgcttctgtttctgctgatatagctaaatggatggctcctgctgttgcatttactgaaggacacagtattaaggttgctcgtttcggagataacatgagaaatgtagccgttactgatggtgatagaatagaagctcaaattaaatttggttggatagttgattactatggagttggtgacctagttaaatcaatggatgcagttacagaagatcaaatagatgaacttatggctgagtactctaaattatatgatatagatcctaaagcttctatagactctatccgtgaacaagctaaaattgaaattggtttaagaactttcttggatgcaagaggatatacagctttcacaactaacttcgaagcacttcacggaatgaaacagcttccaggtcttgctgttcaacatctaatggctgaaggttatggctttggtgctgaaggagattggaagactgctgcacttcttagagctatgaaaatcatggctagcggaaaaggtacaggattgatggaagattacacttataacatggattcagaaaatggattgattcttggtgcacacatgcttgaaatatgtccaacacttgctgcaaccaagccagttattgaagtgcacccacttggaattggaggcaaagaagatccagctcgtttagtatttaaaggcgcttctggtccagctgttgctgcttcattaattgatatgggtaacagattccgtttaattgttaatagtgttgattgtgttgaagtaactgaagatatgcctaacttaccagtagcaagcgttctttggaaaccacaaccatcattaaaagaaggtgctaaagcatggattatggctggtggtgctcaccatactagcttctcattctatgttgatgaagaacaattattagattgggctgatatggttggagttgaatgtgtagtaattaataatgacactaaactttcaacattcaaaaacgaactaaagttttctagtaccgcttggaaattctaattaatagtgctataaatcttatttatataaaagtggtaaatattgattgatgattttagaatatatttcattaaccttccagaaagaaataatagactctctacaatcctaatatttgccactccccttatttgataaaatataaataggtaaaatccgatattcggatttcacctattttcattattacctaatattattctggctcaattattggatgtctaagctcaacaattgtcccctctccaagaatacttctgtagactaacccatactcacttccatgtataatctttattctttcatttacattaaaaattccataaccaatctgattcttatttccatcgttattattaagcatattatttattttatttaatgtttcttcatccataccttttccattatcagctacagtaaaacataataaattatcttcaatttttcctgtaattaaaatctttccattgccacgcttttcttttattccatggtaaattgcattttcaacaaggggctgtaatattaattttattaacttataattaagtatttctttatcaaattgaatttcgtaatcaagcttgtcttcatatcttattttctgaataattaagtagctttgtacatgactaagttcttctttgacacttattatttcttttcctttgcttaagcttattctaagcaagttagtaaaggcttctattatctccactatatcttcttcattatgttcttctgccatccaccttatggtatctaaagtgttatacataaaatgtggcttgatttgagcctgtaaaacattcatttcagccagccttttatttttttcttcaatttgtactaattttataagattatttatttcttttaccatggtattaaaagagccgccaagttcccctatttcatcattatacttagcattgaatgataccgttaaatctccttcttgagcttttctcattaacctttttaatttttgaattggatttacaatagatcttgtgaagattataactaaaatttcagctattattaatgccaaaatagctactacaaaagaataatatcttatatatttaataactcgtaaactctcactttcaggaaatactccaattgtttcccatcctgtatattttgaatcaatctttgtcaattgataattctctccattaatattttttattattatatcgttgttaatattctctatccattcatttttaattctatatactatattattaacaggagtataaacaatctctttgttcatatccataatataaataaaacccgcagttcctggtcttgaattctcaataatcttcttgatggcatctaattttatatcaataagtattacaccttttatttggttagtagatgaatccacaactgctttagacatggagaagacttcatcagcagaatagcgaaagatattatcaatgttcctacctattggcttagtaaataggtgtatagtttcaggcttattataagcctttgtataccactcttcattatataaaggatctcttgatactctgttcattacatcacttatataaccaccattagtgtttaccaccattattccagctatttccggattgaatttaacaaagttataaatagatttatacgcttcgtcttcaatatcagtatcttcagatttattatcattaaggaattttattattctaggatcgattgacatataatttataatgttttcagtattattaacataagattcaatattgctatttatttgttttattatttgattagtgttttcattttgtgaaaagttaattgaatctttatatagtaaatttcccaaagtagtaatagtaatagtaacaatgaggattactccaaaaaaataaaatatgagtttatcccctatgctcttattcataaaatatgtttttaaactattcaccctatacctccaaaacatttgtataaatcatatctatcatccacaaattatcacatctatatttcaagttttattattaactatacttataattaacaagcctatatattaaattatagcccaaactaccaatacttggcatatatatttatttaaatatattacattcgttcaaaaataaaatgaacatttgtgttttcttattttaaaagatcatacaaatgctcattttattatattaatccatattatattatttggtttgattaagaagatgaagcattttttcgcttttcatctctaattacaataattctctgcaatacaataaatatgaacaataacattccaaccgctatcttagtccaccatgaatttagtgttccatcaaacattataagactttgaataattcctgtagttaatacaccaaataatggtccaattatatttccatatccacctgttaataatatacctccgattacacatgctgctatagcatccatttccattccattacaatgaagaccataacctgaaagcgtatatattgtaaacaataaaccacctaaagatgaacagaaacccgaaaatgtatatacaagtatttttgttctttccactggtaaccccattaatttagctgaattttcatttccaccaattgcatacacggttcttccgaaccttgtaaacttcatcatataaaatgcagcagctacaactatcaggctaacgataacattaattgatataaaggcatctggtaatattgatattctatatgatgagatttctgtaaaaactggattatcaattataattgtatcaatgcttataatataacttgctcctcttgcaaagaacattcctgcaagtgtaactatccaaggatgtagtttaaacttttgaatcaagataccctgaactgttccaaaaataattccaacaataagaactattagcattactaaaaaaggatttactcctttttgcaataaacttgctgtaatcatacttacaaaagctatcattgatccaactgagagatctattccaccagttaatattgcaactgcttccccaattgccaccactattaaatatgcattatcaatgaacaagttagtaaatacttgtgctgacaaaaaacttttatataatactgatcctattagaaacaatcctataaataatgcgattgtagcataaattgcaatataatctttgtttattttgaatgcattcttctttcctattagcttattcatgctttaatcacctctttttcttttagattcatttttgtatttttctttatcttaagaatttttctaaactcaggagattgaattatacatacaactataactactatcgctttaacaactagtgtaatttcaggtgcaacacctaagctataaattgttgtagttaatgtttgtatgaacaatgcccctacaactgtccctgaaagataaaaccgtcctcctgccatagacgtcccacctataactgttgcaaggattgcatccaattctaaccacaaaccaacattattagcatcagcactttttatattagcgcataaaattattcctgctattcctgctaacattccacatataacataaagtgaaaatacaactttcctagattgaattcctgcgaatttacatgaattattgttaactcctatagactcaataaataatcctagagcagttctccttactaaaaaatacataattaatgctaccgcaatagctataaatattgctataggaagcaatatgtagcctgtccctataaatatgaaatccttattagtaaaagttaatatttgtcctcctgttataagttgagcaactcctctaccaacaatatataaaattaatgttccaaccattggttgtactcctatatacgaaactaaaaacccattccatattccacatacaagtccactaattattcctattgctactgctaatggaactgaacctccatcaactattacagttgcggaaagagctgcacttattgcaattattgatcctacggaaatatcaattccttgagttgcaattacgagagtcattcctaaagatatcaatattaatggagctgcacggtttagtatatctatagtatttccaaataaatgcccgtctttcatacttatacttaagaaacttggtgtcattataaaattaaacaaaagtaatattattaagcttgttaatggccaaaatattttagcattataaattttaaggaaaaaagtttgtttcttattattttccatattatctagcacctcctgctatagttttcatgatattagattcctctatttcatttccaactagttctccgataatatttctatctctaagaacaattactctgtcacaacatttaactacttctggtagctctgacgaaataaacaaaattgtcattccttgcttagctaatgctaatattaattctgttatttcaccttttgctcctatatcaattccccttgttggttcatctaaaattaataattgcggttctgttgcgagccatcttgctaatattaccttttgttggttaccaccacttaagttacttattttttgctccatacttggagttttgattctaagtaaatctatatatttttgtgaaatttcttgttgttttttcatcggcaaatatttaaatattcctctattagcttgcaatgctaatattatattttctcttattgttagatcgccaactattccttcaacttttctgtcctctgggcaaaaacccaaaccttcctctattgctttttgaggataaatatacgaatagttttttccatttatagttatatttccactagtagatttatctatcccaaatattgttcgcgcacattcgcttctaccagacccaagaagccctgcaaatccaagaatttcccccttcttgatttctatattaaatggatttatagttccagaccttccaaaattatttgttgatattaaattctctctctgttcatcattaactactttctttgttcttgtacttttttctatctcactatagtctttaccaatcattttagaaactaattctatcctagaaagtttgtctgcatcatatgttccaaccaactcaccatttctaagtactgtaagtttatccgaaacctcatatacttgatctaaaaagtgagtaacaaatattattgacataccttcttctttaaattttttcatgattttaaataattgctttacttccttatcatctaaacttgatgttggttcatctaagattaatataccttgagatatatctacagcacgtgcaattgctaccatttgctgtactgcaaccgaataattatttaagactttttttacatctacctttaaattaagcctttcttctaatagtttctctgcgtttttattcattttcttccaatctatacttccatttttcttaggttcacgtccaatatatatgttttctgcaatggatagatttggacatagatttacttcttgataaacagtactaattccatgactctgagcttcctgagtagatgatatttttatttcctttcccctcaatataattgttccttcatctatcttatagacacctgtaagaacctttatcaatgtcgatttcccagcaccattttctcccattagcgtatgaatttcaccttttcttagtgtaaaatcaacatttgaaagtgctctaacaccagggaaaattttaccaatatttttcatctctaaaactatattagaatcactcacttatatcactcctcttgttttaacacaattacaaacatgtacgtaccacatcttttttaacataagagcatggattgaattccagctcttatgcatattatcattaatattttctgtttggtaattctgctgcagcatctttttgtaagaattgactttcttttgagtttatagttctttcaacttctttaccatctaatatgtttttagcaacttcaagtaattgaggtccaagtagtggattacattcaacagttgcattagctttaccatcaaccattgcttggaatatatctttaataccatcaactgaaactataaatatatcttttcctggtttctttccatattcctctatagcttgaatagctcccattgccatatcatcattatgagaccatagtacatttattttatcaccatctgattttagaaatgcttccataacttctttaccttttgcacgagtaaaatctccagtttgtgattttattatcttataattaggacaatcttttattgcatcattaaacccttgttgtcttccaaccattgcagtagaccccactgttccttgaagctctgctatattaagtgttgcgtctttaccgaattgatctattagtatttgtgcagcctttttcccctctgcaaccatgtctgaacctaagaaacatttataaagtgaatcatctgaaactgtaacttttctatcaacaattactactggaatttttgcatccttagcctctttaagaactgtatcccagccagtttcaacaactggatctaaagcaattaaatctaccttttgtgcaataaatgatcttatggcttttatttgattttcttgtttttgttgtccatctgaaaatttcaagtcaaagttaggatctaatgttggaattgattttatagagtcagtttctgctgttctccaaccactttctgcaccaacctgtgcaaatccaattatttttttactagatgaattcgccgctgatgtctttgctgaatcgcctccaccagctccagagccaccgcagcctgaaagcatgccaatacacaatacagcactcgccattaatgccatcatcttttttaacttcataattaattccccctatattcatgatttcgttttcatgaattaattatatatttatacttataaattgtatttgcattaatcagcacttttgtatacttttacggaatatggaaatccatatatttaattacttagaatatctttagttattttattgcactttagtaatacttttttaggaatatcatctttcttgttcaatatttttattgcataatctactgcttcttttcctccagtcttgcatgtaaatgttccttgcaatatgccatttctaacaaggtctatacctccttgaggtccttctaaaccgtcaacaccaattattttaatattttttgaattagtacttacggtagcgtaatatgccccaagtgccatataatcactgtgagcaaaaattatatttacgtccttatcatctttcaatatttcctctaatttatcttctgtttcatttttctgccaatttcctacaatggtcctatctatagcaatatttttatagttgctaattgcttctttaaatccatcagttatttctttatctgtacttgaatctaatattccttggacctctataacattagccttgttattgccagctaaattagcaattagctctcctgcctgcactcctatagatcttgtatcagcccctatatataaagtataatcgtatccatcaacagctctatccaataatataaccggtaaagattcatacgcttttcttacggttggtgttagttctttagagttattaattgaaacaatcagtaaatctgcgccaaagttcatcaaatcttctatatcctctctttgcttttcaacatctccacctgcatccttaaaaattattttaatattgctatgtttcttgacctcttcctgtatttctttattcatacttattctccatggttcatataggtttgcctgagacataccgattataaatgtatcctttttctgagagtttgtcctatataaatagattgcaaaaattattagtccgcatatacaaactataattatagataaataaataatttttcttttattattcactctattttcccctcttatattccgttggcgaaactccaactacttttttaaaagctctacaaaaataatgttgattactataaccgactagttctgccacatcataaattttaacagctggatcctccatgatatacattgctttttctattcttattttagtaaggtaatcaataaaggataatcccgtttctttttttaataatttacttaaatatgaggatgttacttctaatttatttgatatataatttatacttaactcatttgaataatagttatcttctatatacttgattgctagtaaaaccatagaactgcacttctttttttcattaaccctattcattattttcatatattcatcttttatcttaaatacatcattaaaaacacttgcctgctcaattaatacattacactttaaatatttatatatctccctctgtattttttttgcaatagaaatccaccaccctatatcatttatcttgcttactaatatcatatttttcttatcatcattaaaaatatactttaactctaaatctttaaatccatcatttaaaatattagctattgcaaactctaataattcaacactccaattcctaacacttacttcaacattaagtttttctacaatctttataaccataattccaatattttttccaaactcaatatcaaaaaaactcatctcctttaaaacttgttcatcacttaatttattgttaaaccattcgctaaaaaaagttttttgtaatacttccttattttcagctaattgtctttttacccattctaagtaattgctttcttttcccctttcactaagtttattggttactttaattattatctcctctatgttctttttactcacaggttttagaatgtaatcgaaaacattaaactgcaatgctttttgagcgtatgaaaaatcatcatatccacttattataataacaatcccattattgccaatctcttgtagcttttgcaataggtctaaaccgtttaagaatggcatatttatatccaataatataatatccggtctgttttctttaataatttctaatgcaatttccccatcttccgcttgccctactatctcaataccgaactcactccaatttaaaacattcttaataccccttctaattttaggctcgtcatcagcgataactagtttccacataattcctccatttataatatatattacaataataaatttatatttaatattcttgagctaaggctgaattaatattaaaatataggaaattaattgcaagatatattttttattttgttactataataatttttattgttttaatactccattaatgtaattattaatcatatatttatattattttaatatatttccaaaataatttctagaaataattgtatgtacaattttaatgtaatataatatacttgtacatacatgaaaccgatatctttaattatgtaaatgtatactaaaaaatatgtagtaatttattaaatacggaggtgttatcatggcaatagaaaaaaatgttttcggaacaatgcctgatggaaaagatgtttatatttatactttaacaaactctaacaaaatgaaagttgagatttctacttacggtggtacaatagtttcatctttagttccgaataaggatggtaaattaattgatgtaacgctaggatatgataatttagatgattatttaaaaggagataaatttttcggtgccttaataggacgttttggaaatagaattcaatatggaaagttcatccttaatgatcaagaatatactttagctcagaatgatggggaaaatcatttacacggcggcttaaaaggctttgataaagtagtatgggattcaaaaatagttgaagattctcctaatacattagagctttcttattttagcccagatggtgaagagggatatcctggtaaccttaatgttaaagttacttatgtgcttactgaagataatgctctagagataaattatagtgcaacttctgataaagatacagtcgtaaatcttacaaatcatgcttattttaatttatctggtcattcatctggtgacgttcttaatcaaaaattgatgataaatgcagataagtttacagtaaatgataaatattcaattcctacaggcgaaataaaagaggtagccggaactcctatggactttagatcattaactcctatcggcaaaaatataactagtgattatgaacaaattgattttggaaaaggatacgatcataactgggtactaaataccgatggatgtgatagctcaaaagctgctcaagctgttgatgaaaattctggaatagtattggatgtttatacaaccactcctggaattcaattttacagcgggaactttcttgatggttcagatgtaggtaaaaataaatctgtttataatcgtagaaatggattttgtttagaaactcaatattttcctaactctataaactgtagtaaatttaaatctccaatacttagagctggagaagtatataaagataaaaccatttataaattctctacattataaattttaaatttcttattattcatatatagataacctagctaagacctgaacttatgcatatagctcgccgaaatgaataatatacttttgttccagtttctaggtaattctgatgggtgattctaagtctataaagttgcacccaaagtgctagcctcaaagaacaagctgtgaactagcacatttggaacaacttatagccaaagaatcacatccatcaaaattaccaatgaaacattccacaaaagtatattacccatttctagttgggatatattttatagtataaatctaacttataattggcttatctatatagatatccaaatttaaaactagatttgtgtagtaacttaccgaaatcataaatattttgttccgaaaagctatgaaaatatcgctgaaagttctaagcagcagattgtatccaatttagcatgctccaactttcctagggaagctcagctcattttcaaatgttttcttcacaaatatatttatgatttctagtgaagatatgaacttaaagttttagcaactttttaaatacattaatctaataagtcgaattcttaaaatctatatatgtttcaataataaacttacatttaaaattctaataagctaagttatcaattaaaataataatctagaaattaaattgcaacatatataatttactgataaaaaagtgcttagctaacaaatatccatagtggataattatgttttatgatttaattattaaataaaaattcatcttaaatataaccactatggattatacaaataatataaagagaacaaaaaaataaacactttattttccatgattgtatgctcatccaactttgtcttaaagactactttctgaccttagtcgcctaataaatactattctaaatgaaatacgttaccatacaatcattgaaataaatcaaggaaaatccctatctacaatggcgacgctatctatttataaagttgatattattaaaaaacatgctcagtcccaaaattaaaatttcttattaaagtatattaacctcaaaagatattcatcacgctgagtatactcaatacgataaggttgcttgaatttatgcattactaaatttattttaaaatacaacttttagaatgttttttgtaatctatgcaaatacatttcaatatttatacatattttaaaattaatgcttattaactttatgcttagacttatcaaataccttgcgcttatatttttaatgtcatttttattaaaggagaatttatatgtataataaattaaaaaaagttattagtaactatcctattaatacaaaatttaaaataactttttcagcaattttaggacttacttctttccttatggtagctgtgatatgcataatattgtttatttcatcgcaaacaaattcgctatataatggaccatataaagtttctgaaactatttctaatattagagtaaacttacaaacaataaaaatggacatgtttagatcaatcacagaaacagatccaggaataaagaacttttatctagagcaagctgatacagaatctatagctctttcgaaaaatatagaaattttaaaagaaatacataagggagatccatctttattaaatgaatttttatcaaatgtaaagggtttagatgataagagagaaaaattaagtgacttattaaaatcaaaaaccaatcagtctgtaatgaaagtcagccaagatgcttactcttcacaaattaaagagtctgaagaatgtatacttaagctttttaagtcatcccaagaagatgctaattcctttgttactaattcaaatacttatagaagtatatcactaatttctattacgtttattatgataatattaattgtgatatcattactgttaattagggtattgaatgatgtattacttgaagggattaatcatattaaggatattgcaaaaaacctagctcatggaaatcttaagataaatactgaatataatgcaaaagacgaaatgggtgaaatgtcccgcgatttaactaattctatcggaatgttactttcttatattaatgatataacaagcactttggaaagattagcagatggagatttagatatacatttagataattcaatagcatatataggcgattttaatcctatacaaaaatcaataaaaaatattatcgattctttaaatattatatttcagaatatggatcaatcaatctcatcaatttctaatggttctgagcaattatcttcaaccacccaaatactttctgaaggttctattaaccaggctggtgctgttgaagagctctttactagttttaagaacatactgcaaaaggttaataatactactaacaatgcagataaagctaaaagtttttccattaatgtaaaacatattgtagaagaaggaaacgaaaagatgcaaatattgatggaatctatgaaagaaataactatctgctcaaaacaaattgctgaaattataaaagcaatagaagaaattgcttctcaaactaatcttttagcattaaacgctgctattgaagcagctagagccggtgaagctggaaaaggttttgctgtagttgcagacgaagtcagaaatcttgctgaacaatctgccgaagccgtaaacaatacttctaagattataaaaaattcattgcatgtagtagctaatggagaaaagctggctacagagactgctgctgcattagatataatagttaaaaatgtcgatgatactactaatttagtgaaagaaatagctgtagcctctgaagaccaaactgaagctataaccgaaatgaccagtaaggttgatcaaatttctcaagtagttcaaactaattctgcaacagcagaagaactagcagcatctacagaagaattagcttctcaatctcagataataaaaactgaaatatcaaaatatacattaaaaagcaaataatgaattttagccttttagatatcaatacttatttcaagccaaagaattagaatgtaaaaattctttggcttcaatataaaaagctacatcatatctgtgccattggcgtaacgccatgataaaactgctttacttagacgttaaagcgtaatcatataatttctttttatttctgttcttctaaaactctatatattgcttttgctactcctaaattgtcatttgtatcagttatatattttgctatttcttttatttcaggaatagcatttcccatagcaactgattctttgaattctgtaaacatagaataatcgttaaaactatctcctagcaccaaaacttcatctctttcaaatcccattttttcagctacttttgcaagtataatgcccttttgagcagttatatccgtaatctctatattatccctgaatgaagatgaaacagcaattccttttaattctccaataacttttttcattttatttataagctctatatctttatggaaagctacaaactttctaatttctataccactgcttaaaaatttatccaaatcagaaatgtaattaagttgaacaaaatatggttgaactttggcaagttccaaagcttcttctggagtaagctctggattaaaggataacgttctatatgccatttcctttaaagcttcctctttagtgtctgtagtatatattcctttattagtaaatattcttgcagatactttttctctttgaagtatatttataattttagttgcagtttctagctctatatttatctcttctagaatatttccatcctcatctctatactctgccccattcataagtacacattgacatcttatattattttccatcaaaagaggttcaacagtatcatattcccttcctgttgaaattgcaaatataattcctgccttctcagcgcgcttaatagcagatacggtctctttatctattttatgttttgtattcaacagtgtcccatccatatctgatgcaataagttttatcatttgggatcatctcctcgctattttattaaatttctcataccttaatattataacaaagtttattcaattgtaaaaataagcgacatgatttcacttttatcaatatctagttaaaaatagattttattgattcctaacttttatttgacatcttttctatttatcaaacttataacacaaaaaagcctaccctttatataatataaagtgcaagcctttttattcacccaagataattgaaattattaactatataaatcactaattcatacaactaaatatgatttctatattaatttaagcttatttaaatacttgatttattataatttaaaatatatattttatataataaatctacttttaaaaccccatcaaaccaattattcaattaagataataatatagacacttatttgtaatatctatataaatttactagtaaaacatataacattaaattatttagttaatactagtcaagcttatcaatttcatatttttatagttaaatttctctacagaaatatcaaatactattccactacttaaaaatatagtattatttaaaactaaagctggatcatctttttccaagttcaaaaaacttgcttcttcttcagttaatttttcagaagttattattctatccgcaaatcctatttttaattttaaatcatttgtaatgtaatcaaatatagacttactacatatttctttattcaaataaggaataatatctttattatagtaagattcctctatttcaattggatctccatttaaatatcttactcttttaatataatatatctttgtgccaatatcacatttcattctatttgataatttttcatctgcattaattaacgaaaattcagcaaccttactttcaaatttttccttagaatactgttttgataaaccatttatatctcttatttgggcgcaaccattttttgcaaactcccttaaaaatatcccactgccttgcactctataaacataacctttagtcactaatatttctatagcttttcttatagtatttttgctaacattaaatttttttatcagttcctcttctgtaggaagttttttactcaaactatatctatcttccaacatttctttttctaaaatattaacaaccatttcatactttgtttgcatctctgtaattcctcgctttattttaaataagtatttttactaatatcttcttctaattcgtaacacgttaatcctaatctataaagtttctaaaaacaataaaaactgttatatcaaatattaaacccaatatttcctctttcattttcactcgaaatattgggtttaatacttgataattccctttaatgaatatcattatcacataaattcacttttctcttcttaataatttatttaatatctttactaatatattacatcttttacttcttagtatttaaactttatatctattgattcctccacctagcggaataatttaactattcttataattcgttggcatgatttattatataatataaggcaccctttgtaaaggtttaaataacttgttttaagttcacaaaataataattcaaatagtatataagttgaattataatcctatattaatactaattatatatgcttaaccgttaataatatagataactctttaacgcaacttatatagaactgctaattattttgtataatcagcagttcttacttaacttatgtatcatgtatatttatattaacaacataatagtccaaatattaatttgaaaaagtctgagttcccatatatttatcattaccactaattacacctataccaaccttagtgtaagaaggattcatcatatttgccttatgccccggcgaattccaccactgattgaataattcaactggttcataattgttgtatgctatattttctccagttgtagtatattcatagttaattgcttttagccagcttgtccaattattgccctctggagtagtatggtcaaaataattgtattgtatcatatggttactcttatacctagctacttgaactaactcattatccataactaaaggctttagacctgcttcagttcttttttcattcattaactcaaaaattttatcttctgccattgtttgtatacttatagaataatttcttggtaattgaggaagtccatttatatcaatagtatcattactagcttgtccatcatatgctgaattagtcaaaagttgacttgaatcatttgatgattctattaactttccagactcatcaaagcaataaatctttcccgcaatattttgaattcctgtttgcattgctccattgctattcatataataccatttattattatcctgaatccaacctatctgcatcactccactattattaaaataataccaggttccattgatattattccaaccttcttgcattattcctaaattatttaagtaataccaatttcctttgtcataagtccaatctgttttcattcttccactttcattaaaataataccattcatttgaaatattcttccatcctttagctaccttgtttccttctttatagctccatgttctatcatcattttgagtccattcagcagatgcttttaacggtgatagtgtagcaattgttgcagccataataactgtacttgtaattcttataaaaaaagttttcttcattagttttcctctcttcttttgttattctgttatcttacatatagttatgtataactccctgtaaaatcgttttcagaaccacatataaaagtttttccatataattattttaccataaattcgacatttttcaacccattttattctaaaatattttataatagctaaacagactatataattgtcttttttccttctgatttattgtaaatttattataaaatagttatattcatatatatattttctttaagtatttatgtctttaaaaatttaaatacaaatttattgttacagcatatatataatataaagaatttatgttaacgcaatttgttaattaagttaattttcatataaatataaaaatcaatcattttaacacctaattcattaactcatatattagaaatagataatatttcaggggagttataatgtataaaaaaggtgatttccatatccattcaactttctcagatggaaaatgtacccctagggagcttgtcattctttccaaaaaaagagaggtggatattatttctataacagatcataatagtacatctggtttagatgaagctgtcatggctggtgaaaatcttggtgtaagagtcattcctggcgttgaactttcaactaaatacaattcttccagagttcatgttttaggctactttaaagatgatagctacaaaaatgagcttttagttgaagtattaaaaaatgtaaagaatcataaaatttcaaatataaaaaaattgctaggaaaaaatctagatttttataatactaaggataaactttctgtagagactggcataaaaattctaaagttttttggagctacagtggttttggcacatcctgtacttttaaacaaatctgattttgaaaaaatcatagaaatggactttgatggacttgaagctaaatacttcagtaatacagaaaatgataccgaatacttcttaaaagtagccagtgatagaaacttactttacacagccgggtcagatttccacagttgcaaagaattttatagaattcatgggataataggtgacgtttatctaaatgaatctgaaatatataattttttgatacgtggtaagttgccatacttgtaaatactttactagaattatttaatattaaaaattagatatatgtttaatggaattattactatactacatatatctaatttcccacttcataaactatatttcttctagcttttttcttcttttatatattttgttagctaccaagcatgctgtcacagtagttcccaaaacacatatagcagttggagccactgctataaatccagccaaaagcaacccttttcccgaaaccttaatatcaacacttctatctttagacttaaaatttacattaatacttcctgcttctttatctgccttactaactttgttaaaagatccattcattatctctttcttaaagtctagcattcaatcacccctcatataatttacgatttatatttctgctttatttatatcatattaatttaaatctattatatacaaaaaacttccagcctcaaataaaattttaaacaaaaaaattgtaactatactatagaaaaaatctatacatagttacaatactaattataaagttcattaactattttattccaattgttgagcatgcattcagctattttcgaatcatacattattcctttattcttctttatttcatctttgcataactcatcacttatggattttctatacggcctatcacttttcattgcatctatagaatcacaaactgctaatattcttgatgcaaacggtatttcttcttcctttaatcctttaggatatccttttccatcccatctctcgtgatgatataagactatcctagaaatatcttcaaacgtacttgttttacttagtatattatatccaatatacggatgattcttcattaattcccattcacctacttccaggctatctggtttatttagaatgttatccggtactccaattttaccaatatcatgcagatctcctgctatatgtatcaattcgagctcttccgttgtcattcccaagacttctcctaatttataagccatatctgctactctagtcgaatgaccatatgtatagaagtcttttgcttccaaggttgcaaccatacttcttacaacaccatgatacatatcatcattatattgatccaatatttctcaccgccttactaattttgctattcttactaaatataatatcataaaatctactgtgtttgaatataattatttaattcaattaagataattaaaatacttttcaaatatttatagaaacttgacgattaaatcacaatatagaattcattgttaggatcatattcttgtgtaatttcgccccaatttttaatgatgcaatctactatttcaggatcatacattatacctttatttttaattatttcattcttacattcttcatcgcttattaattttctataaggtctattacttttcatagcatcaatagaatcacaaactgctattattctagatcctaatggtatctcttccttacataatccatttggatatcctcttccatcccatctttcatgatgatgtagtactatttttgaaataatatctaagctttttactttgcttaatattttataccctatctctggatgcttcttcataagctcccactcttgtaggtcaagttcacctctcttatttagaacactatcaggaaccccaatcttacctatatcatgcaaatgccctgcaatgtgcaaaatctctaattcttcattctgtatccctaaatacataccaagcttattcgccatatttccaactctggtagagtgtccagcggtgtaaatatcttttgcatccaatgctgcaaccatactttctattatatcgtggtaaacttcactactaaataacatactcataatcatacctccttaaattaaaacgtatttatattgaattaaactctaaatcatatttaatttacttaaattatctctcattgaaaattattatcaattatattatatcctattctacttattaatcaatatttaacttttatcataattttatgataaatatgaatattatcactaaataccctattaacttcttacctttatcaccgctattttttaagaacaaaagtgcataaaaataaggggagttaaattaacttcccttagcttttaaataacactatttaattattttctaaacattcttataataaattttataacttcatttactactataaccataaatgctaaccctaaaactttactccacattatcaccgataaagcaactgaactaaagaaagtagtaaatacttgagtaaatattatttgagccaatccagttataaatattacttgaatagctatcttattcttaaaaaagttaggaaatatactttctgccccaaattctctgcagttaaatgcattaaatagcgcactaaatgcaaataatccaaataaaacagtttccatctcgcttgcaaatccgtttttttctgtggatgctcctaagatattgtacttcatctgtataagtaaaattgatgtaacatatattgcatttagtattattgaggtaatcatgccttttgtaattatacttgaatttctatttacgggttttctattaaaaacattctttctaattggttctaaacctagaactaatgctgggggtccatccattattatgttaatccacaataattgaatcgtagtaaatggcatttcaaaatttaatatttgcgaaattattgcaactaaaaatgctattatgtttacagtaatctgaaattgtatgaatctttgaaaattttcatacacgcctcttccccactttattccatcaatgatagtagtaaaattatcatctgttaatattatatctgcagcatttttagaaacttctgatccagaaatacccatagctatcccaacgtctgcctttgttaatgctggtgcatcatttataccatcaccagttactccaactacttctccattgctttgaagagcttcaacaattctcatttttgtctccggtttacttctagctacaatagctatattttcaatctcatttcttaattctttatcatttaaagtatcaatatatgtagcttccactgctttttttccacctttaagcattccaagctcatttcctattgctatggctgtgtttatattatccccagtcaacatcttagtttcaataccagctcttttagctgcttctatagctttagctacatcttcccttagtggatctcttattgcaacaaaaccactgaatattagtccattttctccatctaagagtttaggttttaaaatacttatctcacttgtaatcgcagcctctgcttctacatcttcaataatcctaaatccaaatcctagaattctcatagatttagcctgtagtttctgtatttcttttattatttcattttttctctcttgtgtaagatctataaatttattatttataacttcattagtagcatttgataacagtatttcaggcgctccttttacgagtactacattcattcctttaatcttcataacagtagccatgaatttattttcagagttaaatggtatttgatgaatcacttcactttcttttctttcctgtttataatcatattcctctagatatgaaagtagtgcacattctgttgaattacctaagtaatttaacttatctccctcaaaacttatatctgccgttgagtttacaaggcaattcttcacaaaataatcatctatatcatttttatcatcaaagaactttccatttaaataaagattctctacagtcatcctattctcagttaaagtacctgttttatctgaacaaataacactaacagagcctatagtttcacaagcttccttttttgttactaacgcattaatcttagccatcttttgcattgttattgctagcgtcatattaatcatagttggcaacccttctggcaccgctgcgactattaaagcaatacatacaacaaaagctgttttaataggatctatagaatttaaaaacgatattactcctgatgtatttatattcaaatcaccagatagaatcattttggtaaccataaatataaatagtaaacctgctataacgcttgatattttagtgattgtcttacccaaatcccccaattttctttgaagaggtgtttcttcttcatctatttgaagagtttgagctattttacccatttcagtattatcaccagttgaagttacaaccattgtcgctctaccataagcaattagagttccgccaaatcccatattaatttgctttgctggaattggatcctgcatttctttattttcttttacttgtatttcctccatattgacaattacttgagcattttttgtaacatcttctgattcaccagtcaacatatcttccctaacctttaaatctattgtctcaatgaatcttccgtctgctggtatcatgtcccctgtttcaagatatatgatatctcctgggactaagtcattttttcctacttgagttactttgccgtttctcaacacctttacaacaatatcttctgtcattttggccaaagcttctgctgctttttttgattttccttctgtaattattccaatagttattccaattgcaacagcacatactattccaactgaatcataatattctccaataattgcactaactaaagccgctatcaaaagaataagcatcattggttccaataatgcattttttatttcttcaaatatatttccttcttttttatgagtaaattcattttttccatacttctcagttctctctcttatggatgaatcatttaggccaatctctagatcgacatctagttcttctaaaactgattctatatctttattaaaatatttcattaattaaactcctcttattaacatgtagctccttcaaatatgattcaaaatctttcaatatattttaacataaaacatagtcaatattaagttaacttataatatcgacttaactactagtttatattattcattataacccattttactacaacagtatcaatttttagatacttttattaattagcttctttttgagcaaacatttttattatatttaataactctcccccataagcttcaattttttttgttccaactcctctgatctccaacaattcatctaatgttctaggtctgctattagatattgcaatcagacttgtatctgagaatattatgtaaggctttattttatccttatatgccctatcttttctccaagattttaaagcttcaaatagctctgtatttattataggctccctactatctaatatcttaaatacaaccgattccttacttttcaaaaccctaattgatctagaattaagttttaacattgaatatgtaccttctttcaaatcaacgtatccatcatctaataatctttttattagctcttttataaatgtacttccgtactccttcattattccatatgttgtaactttatcgagattattttgtattattttaggtcccttaaaaccttttaaaatatccacaagaactgatattccatattgttcttttgttctaaaaactgtggataaaatcatctgactttcttttgtaaaatcttttaattcatcatcgtttaagcagttactgcatttattacagtaatttagcttccgatcatttccaaaataattcaatatatattttctgtagcattcctttaaattacaataatcaatcataaattggaattttctaagctgtatttctcttctattcatagaagaacttctatttataatatattccactctacttatatcttcttcacaataaaataagtaacagtcacaatcctctccatctcttcctcctcttcctatctcttgataatacgattctaagttttgaggaaaagtaaaatgtactatgaatctaatatttgacttatctattcccattccaaatgcattagtcgcaataattacatctaaattctcatataaaaactcttcttgaaatctttctttctcttcatctttgagtccaccatgatacttaccaacattaaatcctaggtcccttaaataataatataaattatctacttcgtttcttgacgcgcagtatacaataccagattcaccttcattttttctaattatatccttaacagtttcaatcttatctacttccttaagtatattaagactaagattttccctattaatatcgcctttatatatataaggtttctctaaccccaataatttgattgagtcttctctaacttcacttgttgctgttgcagtgaacgctgatattataggtttaattttaagacttttataaaaatctgatattcctaaatagctctgcctaaaatcatgcccccactgagatacacaatgtgcttcatctatagcaatttggcatatatgaagatctttaatcaattctctaaatattttggattctaatctttctggtgatatatatattatcttgtactcccccatagatgcttcaattaatatacttcttatagtgtccatattctgagtactatttatatatgcggctttaatcccagccccaactagattgtccacttggtccttcataagcgatattaaaggcgatataactatagttacaccttgcataattatagctggaatctggtaacaaatagattttcctgcccctgtaggcataagacaaaaagtatccacaccatttaaaatactatttataatctcgaattgccctcttcttagagtatcaaatccgtagtatttttttaaagcataaaatatcttttgtttagtatccatctttgcttccctttctcttatatataataaattctacttgtaaatttcttttttagcatatgaaataaaataacgagtctaaaatgccattgttatttttcattaagcaatcaaatagattgctcatggtaagcctattaaaccaatatgccgatgagaagagaacccaaatctgtgatttggtgtgactctcttactcagcgagtgtatgcgaatcgagctttccatgtctgaaaacagtcttggcagatggacttgttatttttcaattataccttaatactagtatataccacataattaaaatcttaaacataaaatgattatctccaaattaacccacacaacaactcaaacaattctaataaatttttcggattttttcccgttaatttttttattttttctagcctataatttaaagtatttctatgtatatttaatctattagccacattaccgatatcaccattctcttcaatatatgcctgtatagtttgaataagttctaatttattccctgccttatcaagatttgacatcattgatatcaaaggtaacttattgtcatgtgataattttataaaaaatctcaattcatcatagctatacactaagcttgatgattttatcttcgcaccaaattccattgccaattctgcactttctagcgagatagctgcaacatcttccattgctccaatgcttattctctttacatctttatttgtttttaagttctctagtaatccattatatagatccttagacgtaacaaaaaatgctattctattatcaacctcactataacttgaatacttttgatacaatattttaaagcttcgagaatttatatttccatccacaagaataactctgcattttttcgtaagatctattccatagcttttagctctttgatggaaattttcatcatactttgtctttctatgagctagttcattataaaatttctgcatacttaatcttttgttctgaatttcctcatctgctttagattgctctattaataaaactgctgttacacgaacaagtttactgaatcttctcacctcatcagggtggccagttatcccgatcacacctattactttgtcattgataataatgggttcattaactccaggtttcattctgtcatcttcttcaaagacttcgtttatttgttggttatctatagctttcctggcgccctcatgcaaattcccaatccttttactatcaccactgcctataattattccactttcatccataacatttatgttataaggaattacattcatcatttctaaaacaattttttgtgctatggttttagataacgtcatatcaaccatccctttctaatctatagttatattataagaattcaaagctataattagtatagtatctattgaaaaatataaatctaattctaaatttgtttatctatagataaacaaatttagaattagacttattagtagtaatttctagcataagctaacgacttaaccatatttgtatcatcattgaaacaatcataaattgatgatacagaggaaaaaaggtcatcaatagaaggaaaagcactaggactgaaaatacaactttttaatttattccagatattttcttgaggatttaacttaggagaatatctaggagtatttattaaaaacaattcttcgctatgcgcgttagcgaaatcttgaatttctttagatgtatgaaattttgcattatccaataaaacatatacttttttgcccggatttgcgtcaagcaatctttcaagaaaaacctcaacctcatgtgatttaatagaatgttgagcggaataagcatccataatggtatcgaatttttttgaaatctcagttgcaccaattaaattaagtccttcgtgagaattattactttccaaaacaggggatacacctaccttactccaagtcctacgaatatcagattctgtcctaagaccagtctcatctaaggcatacaaaacagtatcagaagaattttctacagtatggagaagggttcgcattttttttaaagacctcttgttcttttttatcagccttactaggctttcgttgagctcttttatagcttaatctacgtttttttaataaaactcttatatattcatctgaatatttaataccatagttttggtttatatattctgccaagagagggcaagtccatacatttccgatgaatccgaaatcgtttggacgcgtatttagaacagtatttactaaatcatccttcatttcggctgtaaaagttcctccggtcaaagcaccacgaccatctttaagtgccttaagaccgacggaattccaactttttatataatgaataactgttgatttagtttttaataaaaactttgatatttcaatagtactatttccttcatatctcatgattacagctgttagcacgttacgagcaaattcgtccttagatgaatttctcattttcttaagattttcgattgtccaattatataatgatgttacttcaataccttttctacccatagctatttctccttacaaaaattaactaatactagtttgtgtaaaaataaatatgctatgcataagtgtatttattagtttggatatctatatagatatccaaatttaaaactaaactgatgtgataacttaccgaaattaataatatacttatgttctagttgtaagatactcatggtttaagcatagtttatgattgtgttatctatatacaatacctattattatactttttaacactaaaacaaagctaagtatatataataattagatcataaagccaaagcaatatctacattatcatcatatataaattaaaagtgcgtcttaaaataaaacgcacttttaatattatacttatatttgattaatcacagtagattcataagcctaactatgttttcagcagtcttttcaatattttccttaccttttaccaaagcttcctctaacgaagttgcccccttagttattccaaatattgaatctattccactttcatatagaacttctatatcttcaccaactcttcccgctaatgcaattaccggcttattatgttttttagcaattgtagcaacacctaaaggtgttttaccgtattgagtttgaaagtctatgcttccttctccggtccataccatatctgcctctttaactttttcttctaatgaagcatattctatcaccatttcaatacctttttttagagttccatttagaaatgccataagtccagctccaagccctccagctgctccagctcctggttcatttaaaacatcttttcccaattctttttttattacatctgcataatgtcttaaattattatctaatatttctatcatttcctgtgttgctcccttttgtggtccaaatacatttgaagctcctttttcaccacaaagaggattattaacgtcacaggctacctcaattacaacatcttttaatcttgggtcaaaattctttaaatctaaactatttagttttcctaattctccaccaccaagagctaattcattgcctttatcatctaatagttttcctccaagtgcctgtataactcctgctccaccatcattagtagcacttccgccaatacctattaacagtttttttacacctctatctaaacatgcccttataagttgtccagtaccataagttgtagttagtaaaggattcctctgatctggtggtactaaatgtattccacttgcgctagccatttctaatattcctatttctttatctcccaaaataccatactgtgcttctacttcattaccaagaggtcccattacctttaatgaatatatttctccattagtagcatctactaatgactgcatagttccttctccaccatcagccataggcacatgtaagcattttatattaccgtttgctttttttattcctctttccattgcctcgcaagcttcttttgctgtcatgctctctttaaaagaatcaggtgctaatacaataactaaatcttttttcattttcaacgctcctaactaaatttttatattttgtgagattattaaactgaacaaattttacttatactattattttataaaaccgtatattattattgatacgataaccatagatcctccaactatagattcatatggcattaatttcatacgttcctttatattcatttttactgcatctgctgatgcgtggaagaagttaccatgaggtagatgatcgataactacagctcctgtgttgatcataattgctgcacttaaaggtgcgacaccaacagctagtattgctttcgcaaaggttcctgttgctacaattgcacctgtagatgttgaagccgtagctgctgccatcaatatacctgatataggtgctaaaaatactcctgaaatgcctgtttgttgaatacaatatactactgcatcacttaaatttgatttagaaataatacccgctattgctccagcaccaattaatatcattacagttggtgtcattctatttaatcctgatgttgtatactcaagaatcttactacgttgtcccattgcaaacaatccaattaatcctgctataggcaatatatacattgcatctatttgaatagttgctaagaatttcaaatgcaacatattcgctataggattaagtgctaataatattacagcaactattggtgctaccatagcctttccaaagcttggctttaccttattatctactctaactggtatttccgattctttaatcatttctccttttttactaattaacgtcgcaacaaaatatgtaactataagcccaattactgctggtataaatgctcctatcataacttgtgctaattcaacattaaatcctttagctaccgcaattgtattaggatttggagaaattatatttccagccttacctcctcctatcatagctaaaagtatagacgatttagtgattccaacttttttagccacaggaagtgctataggtgcaactataataactgtaactggtatgaaaactccaaccgctgtgattatcatacttgatagtgcaattgctaaaagaacctttttctctccaagtttttctactatagtttcagcaattttctctgctgctccagattcaattagcacacctgcaagcactcctgctgctattacacgaacgactgctcccattacgctattcgtaccttcaattatggcctgtgctgtattagctaaactagcaccaccaatcagtccgcctataacagctcctccaaaaagtgcatatacaggattcactttccttaaaattaatattatagcgattactaatccaataatcgctccactccaatgaataactgccattatatttcctcctcaaatttaataattatacaattttatcctttatgataccgtgtaagcgagttaacgtttactaacatatacataataatatatttattaagctcttgatattgtttacttgacatttttttttgtgtatttgaacaataaactcttaatttaaatcttatattctactttattagttgaattctgatactaaacacagcttttaaagatctatgcctttttaagcaaaactgccactgcatctagtctttattcataaatttaatattattaaactctgaaagtctgccttttaatagtataatcgtaactattctaactgttttactttttcaatttttttaatctattgtgcattataacaataattcaaaaattaaaagctgccgacattttgccggcagccttagaatagaataaccaaatttaaattatcttaaatttctatttaaacatatctttaaataatctactttccttcacatcttgagttactttagccaagttgctagtatctccaattaaaatagctccacataaacgattgtttgcaaaataatattttttatatgtcttcttaactggatctttaaattcaactgttttatattgaatttctgggttcttaccgttgtcaccaattgcatacagtgaagtattagctccattaaatgttaatgctgcatctactgtttcataagttaatgaatctcctgctgcattagcacctgctacttttcccatttctagagcttgtggccatattccatagtttactccattatattctgcacaatctccacatgcataaatatcagaaacattagtctccattttttcatttactattattgctctattaacatcaattcctgcttcctgagctattttagaattaggtacaataccacaagatataacaactaaatcagctgcaataacttctcctccattaattctaactccagtaactgaattttcgccttctatctcatcaatttttacgcctaatctcacatcaattcctttatctttaattatttcttcaaggaattttccgccttcataatctaattgacgtcccattaatttatcagcaagctctaatactgtaactttacattttgcttttgttaattcccatgcagcttcaagaccgagaactcctccacctattacaactgcattccttacctttggcaataattctgtaattttatctgtatcagaaattctacgaattgctataacttctttcttatctttccctgaaattggtggaacaaagcattcagctcctaaagcatatatacatttatcatactttaatttaattccatctttaaacacagcctctttatctttagcatttatttcaattaactctctgtcaagaacatttgtaatattattttctttataccaagcttcatcatgaactgcaatttgtttcgaattaaatttagctatcattgactttgtaagcattggacgattataacctagcacattttcattagaaactaatactatagagcaagtttcatttctttctcttatagacgttgcagcgcttatacctgccgctccatttccaagaattagataaatttcatttgtattatttttataattgctatcatctatttcaactggtacgaaattttcttttcctacaccacaaactggacatatttcaagacttgaatcaaatatttctccacacactaaacattttactaatgttcttttagctgattttttctttggattctctttattttgaagtatacatccaaaattatatccataatcataagcctcacttaattcactatcactaggcttaaatttaattctaaatccatcatccacaaccttcatcctaagttgttttaatctttctataatgtgtggaactccttcaccactccatccataacttccaaaggcactagcaagttttcctccatgtgttctagcaaacatctttatagttaaatcccaaattggctctaaagcctcaccaactatagtaggtgttccaaataaaattccatcagcgaatcctaattcttcaattactttttccttatcatcttctactaaatcgtacgatcttacatctatatctccgctatctttaataccttctgatattttaccagctaactctttagtatatccatacgcactaacataaggtataattactgtttttcttggatttggattaactacagtacaccattctttataaagttccatgatttcatcaatcctacaatctataactggaccatgcccagtacatatcatatcaatatctagatctttaattctatctaatgccttaaccatgtatggcgtcttaaaaggcccaatgatacaatcaaaataatatttagtagctcttaagtaaccctcattatctttaaccttactcaataatatttcatcaaaactatagtgagatccaaacgaatcacaagttataagggttttatcctcttcaatatatgtatacattgtatctggccaatgtaaattaggtaagaacatgaaacgtaatgttttatctcccaattctaaagtatcattttcttttactgttatgctataaaaatcacgatttacaatattctttagaaatcctatagcaacttgtgtaccaactattttaatattaggattgatttcaataagcttttctatactcccagcatgatcaggttctgtatgatttactacaatataatcaatatcattaatatcaactaatttatttaatgcacttaaatacccatcccaaaatttagctttagcagtttcaaataatacagtcttttcccctgttttaagtaagtaggaattataagatgttccaaactctgtctccataactatatcaaatacttttaaaccaggatctaaaactcctgtccaataaaaattcttttttaattctaatatttccatataaaattcctccctataactttcatctatatgaaaatattatacctttttttatagtaaaactgtatcaaatactagaaaattattataattcacaattaataaatctattttataggaaataatacgagtttaaaaggtatgattcattatattttacggccatcttaaacaatttattttttattaattttattgaaacttttccatttttataatcttcaatactttttaaaaagctcattttctctttatcatctgctaaattcttaaaatatccccatacatgtaatgcagtatttattgaatttccaattgttatttcctcttccatggcatcttcaatataattataaaacttaaccgctggatactgagttttatctttaagcagcttccttatttctaagtaatttgaaggagaattctctaaaaccttgtatttatatcttccccattcttcctcaagtttttttattttagtattttcagctatagaatttatacactttacagctgaaaaatttttatccttaacttcaagcattatatctatatctttcccttttacactttcatagaactctataaacttattaatttttattgtatttgaatgagagcctgccttttttaatgggtcttgctgagaataatgtattttctgccttccatctttctctttccatgttttattacattcacttatccaatatgaatcacttttttctctatcataacaatttatctcattatgaagattatcaaaaataaccggaatatttagttcctttcctattttaagaacatcatttatattgtaagatttatcatcattttcaataacaagtctttgtttaactcgattatctaattgtttataattgtttacgaatctgtttattgcttgctccttatcattataaactccaccaatatgcaatataattttatgattttctccaactcccaagttatctaaaactttaacatgataatttaagtcttcaattgctctctttacaacatcatcattaggagaattaagtactgtatattgccctggatgcatcgatactcttatattattattcataatctttctacctatttccgcaaattcttgcgaaaacagcttccaccacgataattggttcaagtgactggatccgaatggtattaagtctgaactaatcctaaaaagctttatgtcattctttatattataatcaattatattattaagagattttaaattatacgatattatttccaataacttttcttcagttaaactcttagcagtgcagctttttagattagcatctggaactcctattgttaaacatgcatatcctatactcattatttaatctccttttctaataatcttagttacccattcgcttattttagtactctttaaaatattatacctttgattctttagctcttgtttagtatcaaatatatacaataatccaaaaataacaagtcatttaatttcctttatactgttatgtctcatttctgacattgattcaagtaaactttttcattaattcaaataaagtgtaaacccaatctttaacttgtagttttaaaatatgataactaaaattaggacttattacaataagtcctaataaaataacaattacatattaatttttatttagattttctttatttaaaagcaggaatccaaaattataaccataatcataagcatcacttaactcactctcacttggtttgaatttaacacggaatccttcatcaacaaccttcattctaagttgctttagtctttctataatatgaggaacagcttccccactccatccataacttccaaaagcacttgctagtttattaccatgagttcttgcaaagattgaagtagttaaatcccatattggctttagagcctcaccaactattgttggtgaaccaaataaaataccatctgcaaattctagttcttcaagaactttgtctttatctgcctctaccatatcataaactctaacatctatatctccactagccttaattccttctgcaatcttttctgctaattcttttgtatacccatacgcacttacatatggtatgattactgtctttctaggatttggatttgaaacattagaccacttcttataatattccataatttcatctattctacagtcaagaactggaccatgtcctgtacaaatcatatcaatttctaaatctttaatcctatctaatgctttaatcatgaacggattcttaaaaggtccaataatacaatcgaaataatatttaagagctcttaaatatccctcattatctgtaaccttacttagtagaattccttcaaaactataatgagaaccaaatgaatcacaagtaactaaagtcttatcttcttcaatataagtatacattgtatcaggccaatgtaaatttggtactgacataaaacgtaaagttttgtcacccaagcttaaagtctcattttctttaactattattccattaaattctctgttaacaatattcttcaagaatcctatagcaacttggcttccaataatcttaatattaggattcatttcaataagtttttctatacttcctgcatgatctggctcagtatggtttactacaatatagtcaatatccttaatatcaactagcttatttaacgcctttaaatatccatctaaaaacttagcctttgcagtttcaaataatactgttttttcacttgttttaagtaaataagaattataagaagttccaaactctgtttccatgataatatcaaatacccttaaattggcatctaatactcctgtccagtataaattttttttcaattctaatatttccatgtaaaaatccctccctagatatatttcgtccaaatcagagcattatacaccttttttgtataacaaacaattaataatacctttaacatcgttatactaatgtatttcaccatatatattatacacaaattcttatatattttcataaaaacatataatatattgctttttcgttaattaactatatatttgcaaattctaagtataatctcgtacttttttacttattcctctacaaatgttgtttatatatatctgaaaattcaatatttattttttctacacaagtattaattatattattacttatattaactctttctttacttttatttaatacctttactggaagtttaatcgtaaatttagttcctactccatatttactttccactgatatcgtgccatcatgcatctctactaaggactttacgagagataatccaattccgcttccttcataatttcttgtaaaagatttatctacttgtctaaatctatcaaaaataatttcaactttttcttctggaattcctatacctgtatcttctacagacaaggttatatattcttctccatcaaatatatttacaaatatgcttccatcatcatctgtaaactttatgcaattagacagtaggtttaacataatcctttcaattttatcaggatcacaagcaataattttttcttcaacatcggtatcaaatataaggtttatattgttattgattatataaccagctactgacagagtgatttcttctacgacactgacaatgttacaattaatcatatcaatctcaaaatgtcctgcatctaatttagttgaatcaattaaattatttattaaacgaagtaatctaaaacaattttgtctttcaatgtctatattattaattatctttcctttgtcgatcggtttttctttatctaaaagatctcttcttagaatttgtattacacctagtattatattaagtggtgttctcaattcgtgagaaatattagcaaaaaattcagttcttaatttttctaattccaaagcctcttcttttgattttaattcagtattttttctttcagttatgtctcttacagttgcaataatggccttctgctcattaaatattattgcacgactattactctcaacccaaaactctttatgatttttatctattgaaatagcttcaagggttactggagtattaatcttatttttctttctatcattaatcaatttaagtatatcatcgtatatgtacggtgaattttttgaaataatatcttttatactcataccaattagttcatcatgtagatatccatatagcctattagcagtatcattaacgttaactataatcccattaaaatcatgaattaatattgcatcacttaccgaattgaaaatagtgcttaagtaaacttcacttttctttaatttcttatttgtttgctttaactcatctataagcttaatatttttcattttcaattcatatgtctccaaagccctttttacggaaattaacaactcatctgcctccaatggctttaaaagaaatttataaatatgcccttcattaattgaatcaataatatctttcacatccatgaatccagttaaaataatacgaattgcatttgggacaatagatattgtttgctttaataattcaacccctgtcattcctggcatgcgctgatctgagataatcaaattgatttttttagaacatgattcatctttaagtatatttaatgcttcaaacccattttctgctttgattacatcatactcttcttctaagagtcttgttaaagcctcaagatttgctagttcatcatcaattaatagtattgtatattttttatctttactatctgttttattaagttctctaagcttgtccttatttataacaaatttcatttatcttctccttactgaaattaaaatataattttagattatggtgccttattgattttattattaatatcttttagtaaggaatatgaatagttatagttgatccttcccccaccttagattccacatcaatacttccattgtgtttttcaataataccatatgatatagacatacctaaccctgttccttgtcccattggtttagttgtaaaaaatggttcaaatattcttgatattgtatctttagtcataccacacccattatcacaaaattcgattataatttctttgttattgtcaaaaacgcttatacctattaatccattattctcacatactaagtcattttgtttttcaactatagcatgacacgcatttacaattatatttaaaaatacctgatttaattgtgaaggatagcactctatcttcctatgagtttgaaagttttttataaatttaatttgtttagtatatttggttttaaccaaccttatcgttgtttccaaagcttctgaaacatctatctcttttttaactgcctcatcaagcctagagaataatctcaaatcgttaactatggttgttacttgattagatccatctagaatattaattattgatttagaaaatttgttgaaatattgttcgaagaaatttaaaacatcatcatccgcattatccaataattcaataactttttctttaaaattgcataaatccatatccagaacttttgaacttaaatatatataattaataggattattaatttcatgtgccacccctgctactaaagtaccaagactagccatcttttctgattgaatcaattttgactgagctgacttgagcttattatgttgttcttctaactcagcaaaagtctgcataagttgttttgttctttcattaactttatcttctaattcatcgttaacgcgttttaactcttcactaatttttttacgttctgtaatatcattccaaacaaatattacgcattctatacagtcaatttcaattatttccgttgaaaataatccaactctaacttctccatatttagtgttccaagttatctcttcattacgtagcatgcctccactatctaatatttgaatcaccttcaagcgatgttcttcattttcccataagttaaactcatctgagtaatgaccaattatctcttcacgtttatatccaaaagtgcgtaaaaacgcttgatttatttcaatgtatagtttatcactaagccttacaatagctattacatcagcactataattaaatgccttattaaatttctcttctgaatatttgagttcatttattgcttcattcctctgcttaatcatattatataaagtttgagccatattattaaatttaatagccaattcccctatttcatctcttgaattaataaataatctgtgagtcaagttcccatttgatatctcatcagttcctacactcagctcatatatagacttggtaacaatacgagaaacaatacttattgctagccaaagaagtaaaaccattaccaaaagccttatgattgtcgcaattatgtaattttcaataacttttgatttataataccttgtaagacctatagtgacctcacctattggtatttcatcttttaaaacgttgactttctttataatcaaattttgctcagaatatatatcatcttttttatacttattgtatatttctccattacctttagctttaacttgaatataaccaatttcctcatcctcaaataatgcatcactaatttctttaattcctacaatatttaaattccaaattgggtcttgatagctaagtgctgctaatctagtgattgtttcaactttttgcattgaatccttatttattcctgaaaccaatattattattcttattatttcaaatattaacatggtaattataactactgttaatgttgaaattgtaaatctacgcttaatcttcatattcctaaatttcttttttatgctcataacttaacccttatttatccatatgatttaatactggaatatactctttacttccaaataggtcttcatacttaaatcgtgaaatattatcccttgaaattataggcacacacggaccactttggaatgggaaatctactcctgccttttctccatttaaaattcttacaatcatatctaatgctattctacattgttggatagtttgatctgatggagaagctaatacagctcccttttttattagattaaaaacatcacttgtcatatatgttgatacaattcttatatttttaaatttctctttgcgtttagaaataaatttttcagcttcaattactgctggagcacaaccaactaaataatcataatcgtcattattttctaaaacacttgttatatgtaatcgctgcacatcaggtcttgtgtctccataaaaaggattgctaatatctatcttttgatcatttgtctttaaccttgaaactgcatctttaaaaccatttaatgtatctgatgcccaccctgattcttttggcccagggaaaaatgcaatttttatatctttccctgctgaatcttcaacaacatactctcctgctttatatcccatatcataataggaaactattgcttttgcgctaatatcaggactattaatatcatttactagtgcaacaataggcttatcattatgaacaatattctctacatctgaattaaattttgtattatctaatgtagcaaacactattccatcaattttatcatcctctgctaagtccatcagctcttctttttgatttccaaactctatatagcctccaactgcatataactttaccttcactcctaattcctttgcataatttattattccataattcgctgagacccaatattgatcttcaaaatgaggtagcaaaacgcctattgtatattccttcttaggcttaatatgcctccacttttcttttacaacgcctctcatatcaccctctttactatttgaagcagcatcaatattataatagctatttactattaacttttttttacctatttgtgtaagaattctatcatcatttgtctccactgttgttatactcttcgatacacgttctctttccacgtattcttctttttcttttctgacaatatcattagatcctatgttcttgtgattttttatatatgctaatcccaatataaatactactgacgttatcaaaattgatagtcctaactttctattgatatattttccaactttcgtagcaaagcacatccttactttcaagctctctatggatattacctgcagtattactttaatcgtcattaaactccattaaacttgctattctactataatctttatgctatcttaagtttaatttttttactataatttgtcaaaacatactatatgacaatattctgcaaaatatattttatgctcagtataaataagaataaaataaaagcactataccagaaattccagtaaacagtgcctttaaaatactatatatttaattgttagattttaataaattcattttttaattctttagcggctgtagtaatatcttcctttgctataatagcagaaactattgcaagtccatcaattcctattcccttgaaatccttaactctatccttatttattccacctattacaactataggtatagatacattttctctaatttttcttaattcattcatactagttgaatctgcgtcttttttagtaccagttgaatacatcgcaccaactcctaaataatcagctccatttttttctgcttcaagagcttcatttacagaccctgttgaaactccaaggattttatcatttcctatgacttttcttacaattgctgcaggaatatcactttgtccaacatgcactccagccgcatctactgctagtgcaatatccactctatcatttattattaatggaatattgtgtttatctgtaatctctttaactctcacagctgtattatagaagtcgagtgatgaacaatctttttctcttaattgaattaatgtacatcctccaattatagctttttccacagcttcttctaaagtttctgtactcattaaatctctatctgttacaaggtagatactataatctattttaggtttcatgaaacttctctctccttcatattatattttagataagttcacacattaatgcgtgtatttcatttcaatgatatacacgcaaacattgtttattatatttcctttatcttattcatcttttcaatgatattagaagtcaaattgcttatggcatctataattgcaatatgaaaacttcctgttccaatcttccctgctttatccaaagcaatttcacccgatattcccatggaaataataccagaaactgctcctataaaataatctgaacctgccccacaaaacgctccaattaatgcagttgtcatgcaacctgttcctgtgacgttagataacatcttagttccattttcaagtataactactctttctccatcagatataatatctgttgcacctgtaatggctacagtacactgaagttttttagctaagtttttagctacatctattccctcatcatttcctgttcttgcgtcattttctgaggcatcaactcccttagttgtagagcctaatccgcttataaatttaatctcagacatatttccacgtaaaacacttattttcacttcttctaataatctctttgttgttgaatttctaaattctgatgctcctgctccaactggatcaaaaacgactggaatatttaattcatttgctttcttaccagatgcaatcatagattcaatagttcgctcatttaatgttccaatatttattacaagggcagatgaaatcttagtaatatccgctgcttcttttatatcatcagccataattggtgatgcacctattgcaagtaaaatattcgcacaatcattaaccgtaacataatttgttatattatgtacaagtggtttcttattcctaacttcatttaataaacttcctattttaattgatatttcattactcataaatatcttttagtaagaattcattcttttaataattctcactaaaatacctcctctcaaaagtaaaaatttttcaagtttcttttgcttgatatctatgttgcaattatgaacttacatttaaaattttaataagacaaatgctaaattgaaataatactgtagaaattcacttgcaacatagataattataatttacgtaaatcttatttctgatccagaagctccactttatcgccatttaaaattctgttagttgttcttactgcacacattttcccgcacatagaacagctatgcatatcttctggtggtacactttcaaaatattccctagcctttttcccatcaatagcaatcttgaacatctcttcccaatcaagtttttgacgagcatctgccattgcattatctctatctctagcccctggaagtccattagcaatgtctgctgcatgagctgcaattttcgatgcaataattccttctctaacatcagataaatcaggaagtcttaaatgctcagctggtgttacatagcaaaggaaattagctccatgtgttgctgcaatagcaccaccaatggctgaagttatatgatcatacccaggtgcaatatctgtaacaagagggcctaatacatagaaaggtgccccatgacataatcttttttcaatttgcatattagctgcaatctcattcattgccatatgacctggtccttctatcataacttgtacgtctttttcccaagctctttttgttaataatcctaactctataagttctgtaatttgtccagcatctgttgaatcatcaatacagccaggtctcatagcatctccaagacttattgttacatcatattctcttagtatatcaagtaattcatcatagtattcataaaatggattctcatttcctgtcatctccatccacgcaaatagtaatgacccacctcttgatactatatttaatcttctcttatcttctttaaatagcgaaactgttcttttatttattcctgcatgaatagtaacaaaatcaaccccagctttagcatgagctaacaccacgtcaagaaaatctttagcttttatatctaaaagatctttttcaaggtatccaattgcatcatacataggaactgttcctatcatagctggagaatattctataagcttttccctgaactcttgagtcttcccataattacttaaatccattattgcttctgcaccaaaatcaactgccatttttactttttccatctctctgcaataatcaaccgaatctcctgatatccctaagtttacatttatctttgttcttaatccatcaccaatcccctcagggctaagtgatttatggttgatattagccggtatagctactttaccttctgcaacaagtttcattaatttttcttctgaaattctttctttttccgctactattttcatttcctttgtaactataccttttttagctgcttccatttgtgttttataattcatttctttccctctcctcataccattattatttaatttattagttataaaatttaacttgagttctatagtattattcaatcattcctgctttcttatatatctcgtaaaaatggttagtagggcctacacctttaccaagctcaaaaccatgttcgattgcacatgttatatactctttaccacttctaactgcttcctctattgtcatattcttagctaaatttgctgctatagttgaagataaagtacatcctgttccatgagtatgggtagtatttattctttcttgctttagaacaagaaagttatttccatcatataacaagtctgttgcttccccttctaaatgccctcctttaactaaaactgccttcggaccaagttctttaagtttcaaggccgcttccttcatttcatctaagttttctattttcatccctaaaatttcttctgcctctggcaaattaggagttattaatgttgctaatggaaataattccttaactaaagtatcttttgaatccttcgataacagattaaatccacttttagaaatcataactggatctagaactatcactggtagtttatcaacttttctcaaagattttgatatagcttttatagattcaattttagaaaccattcctatttttatagcatctactcttatatcttcaaaaataacatctatctgagattcaatcatttcaggatttatatcttgaattccaaaaacccccatagtattttgagccgttaccgctgtgataacactcatcccatatactccatttgctgagaaagcttttaaatccgcttgaattcctgctcctccacaagtatctgatcctgcaatagttaatgctctaaacataaactcatcctttcacctgtaatatttcatttaaatcttatctatgttattagtttcctctcttttaacttgaaactcattatctactagtatttttttaatgacaggaacttttacaaaaaagtacgctataattgctccaacactacaacttgatataaacggaacaacatatacaaaaattgctacttgttttcctaacaccattgtagctataggataagctaataatgctcctaatattccagttccaattatttctccaattactgcaatgcccggctttctaaattttttataaagaattcctgcaagtaatgctcctaccatgcttcctggaaaagccaataaacttcctgttcccataaaatttcttattagggatgtcacaaatgcattcataagagcatatactggcccaagtgttattgctccaactacatttacgaaatgttgtattggagatattttagcagctccaatcggtattgaaaatgttccaaaaataacagaaataccgattaacacgccacttaacgccatcttctgtgctttactcttttctttcattaaaattcactcctttaataataaaatcaataaacttactttttaatgtgaaataaatttactaaatcacctttacaatgacgtttaaattgattaaccttaaaagaagttaattattttgcataaaaaaaatgtatccacaagggatacatcaataaatcatgcacaaatcatatcaatacttacacaaataatattaatatacttccctacgctggtattatccaaatcaggttataagagtctaggaaatcaatctttccaatctcagccaaaatattagctcccctagttattcaattacaaaattttctttcacaatttaaaggttataccattaagtttcaaacgtcaagtatattttattattttgcttcattcaaagcatttgttaccgcactcatgatacccttcgaactataagttgctccagatacagtatccactgatgttgattgttttgaaattatgctcttaattatagtaccctctgctctttgataaaactttggagtatcttgattggatatagcttgtatacttgatatttttccatcagacacagttacagaaatcttagttgttcctcctctatatcctgttccacttcctgtgtatgtcccatctttatattcacttgcattattttgaactgtatttgaacttgtagtttcatgatttaattttgaactttctggtgcagcttcagtttgtgaatttatattgcttgaaactgcattactcttagctgcgattccagatttagttactgcattgccggcgaaattagtaagtccatatatacctaaaaatgtagccatagctactgatcctgttaacttagcatccaaatctcttccaagtacatttacattagcattatttctgtaacatacttcagtacattttaagcaatttatacactctccacctttgacacaatctaccttatagagcggtaaccccattgagcaattcattgtgcaagctctacatttaccacaatcagcttttggcttattaatcttaactattccaatcttagaaataatagagaatattgcacctaaagggcatagatatctgcagaaaaacctctcaataaacgctgatcctattgtgattaatattaaaaatatcaatccaacaagtaaattcgaaaaaatagtagatacatcagttatttgaccaaatacatcccaagggcttgtgctttccagtatactgcttcccatagtccatgaaatagctattataaaaagtaatactaaatatttgaaatacttaagtatagaatcaactttttcatctactttaaactttattttgaatattttttttgatataaaatatattaagtcattatatgcaccaaatgcacatatccaaccgcagaaccatcttcctaatactatagtcaaaagcataatagctataaattctattaagcttggtaatgcttccaaaaagttaacattaccattgataatcatttgatatacagtttttacttcactgaatgtcattgaataaagacctggtaacagaataaatgcaatcaattgtataatatgccttataatctgcgatttttttattttacttgccatgtttctttccccttttctaactctctatatttagcaataataattttttatgttaattatcattaatcatatttttccaattaatttccaatagaaatattattttcacttcattatctgctattgcaatttctttaattaagtgaattatagcaatagaaccttaatgcgcccttaatctaagctgagaattcgctgagaaatggcaattaaaacattttagaattaaggaaaaggctaaattgtacgaaaaatctaactaaaaaaagatagtacaaattgaatttatccctgctaataagttatattccaacttaacgaggtttgtttcaatcggtattatctcttcttatcattttgcttgatttaaagctttcttatttcctcaattatgtccttacctctatatttagcttcagacacaatagctaaaaaaattcactatctgttaatgtaaaaatactttcatcaatacctgatgttttatatattttcttatcttctgtaataaatatagcgtcaatgccctctatagtttctataatcttcatagctttatcaataccaattatataaacaccagttgataagccatctccttcaattgaattatctgatataatagttgcacttataattttgctttcagatgggtatcctgttttagggtcaattatatgatgaaatctctttccatcttttataaaatatctttcataattgcctgaggttactattgatttattttttacgcttaatattcctataaattctcccctaggcttaaatgggttttgaattccaactttccaagctgaaccgtcttccttacttccaagagcaaaatgtttccacctaaatcaattaatgcacttttaatattatactgataaaaaatatctcttacttcatcagctgcaaatccttttgcaatacctccgacatctagagcttgcttatcatgttttagcattattgaattatttttgtcatcaaaaataacatcattgtaatttacaagttttaatgttttctctatttgagatttttctggaactttttcttcttttgtacctatgctccataactttactaatggccttattgtaggatcaaaagtaccttctaaaactttactgtattctatggcttttttaactacaaaataagtatcattatttactttctttcccttatttcctgcattaaaatttatttttgatatatcactactttctttgaaagctgacattctatcatcaatttggtttaacctttctagcgctttatctattgccattttagctttatttccatttgctcttaagttgatcaaagttccaagagcataactgctcctagttgcttcatgtttttcaattttaccagtcacaaatataaaaaataaaataactattattatcacaatcattaatataaaaatacttactgtacttataataatccccacctacctaaaatatataaatttcctcattgttggaattataacaaaaaagtcttaatgtatccttagttaaagcttagaatttcctgagaactatttaagactactcacccagattttcttagcgatatcttaaactaaagatgcgttgatattttaatcaatagaataacgatatatactaaaaaagatgttacaaaataatataataaatctattttgtaacatcttttcttatttgggcacaatcaaaaaatatcaaattcatctgccttattttctaattttaaatatattgagaatgttgtcccaactccaagctcactttctactctaatttttccacgattgctatcaattattgattttactatagagagacccaatccatatcccccttgttccctagctctgtgagaatcacttctgaaaaatctatcatatattttatctaaatgttctttaggtatgccagctccattatcagaaatctttaaaactgcaaaagttttattttggtaattttctatatctgtagaaattgttataatacctttgtttttatcagtatgaattacagcattttgagttatgttaaatatgacttgtttaatttgatttttatttatatatacatatatattattcttcagatttaagtttaaagtccgatttctagaaagtatttgaagttgagggactatttcatttataacatcatctaaattttccttgtttatttcaacaattggcttctgatctaatttagttaacattagaaggtcatttaccaattttgcaagcctttcactttccatcaatatgctgtttaaagccaaatctaatttttcctgattttttgctgcccctcttaataatacttcaacaaaaccatgaattgaagttagtggtgtacgtaattcatgtgatgcatcagatacaaatcgtctcattttttctttgataagctgttctttttcaaatgatgcctctattctttcaagcataatattaaaggattttgataatctattaatttctaattgaccactttcttccgttagtcttgtatgaagatcagttacacttattccttccacagtatcagttatcttatataacggcttcaatgttcgattaaaaatagtgattccaagtattgttcccactatgagaatcataatcgaaagactaatatgcacatactcttgcctatctaagatacttgtaatatcgtctattggtgtactcagctgtattaaccctgatggtgaatctaaatccccaacttttatccatgcaaccatttgataattattgttttcatctcttactacttcatatgtatgttctaaattcccttgttcattgcaaatctctatatatttctctctagaaagcaccggtactggtacctctttcctctttagctcatctggctcctttgaatcatcgtcgccgtcatcatcatctctaggtgtatctatattgcttctttgacctaacagctctccatttttatttattagagctacactcatatttttatcccacaaattctttaaaatttctttagtatcactttcagttatatcctccatattttcttttgacattttcttaaagtctagattatgaaacctctcatgaagtacttgcacctttgttttgtataaataatttttcatacttatatactgaaaaagtcccataattcccaataataaaattaatatcacaagaaacctaaacaacaattgccatttcaaactctttatttttaatttatttcttaattttttcattgtgccaccatcttatatccaacacctcggacagttttaatgatattatgatctttgtctccaatcttatctcttaagtaccttatgtatacttcaacaatattatcttctccattaaaatcatatccccatactttttcaagtataagcgatttgctcaatgctattccattattcataagtaaaaaacttaacaaattgtattgggttggaggtagatctaatactttttcacgataggttatttcatgagctttatcatccactttaaaatttcctatattagtaatatcgcttagctccggaaaactatttcttatcctcgcattaatgcgtgctaaaagctccttgaagctaaaaggttttgccatataatcatcagctccaatatccaacccttttaccttatcatcaacttcatctaatgctgttagcataataactgatgtttttatagacttcttaataattgaacatacctcatatccatccattcctggcagcataatatccaatatcactatattaggatttatttttcttgctagctctattgcttcattcccatcatatgcttcatatactaaatacccttcaccttctaaccccattttaataaagtccactatacttttttcatcatcaactataagaatagtaatctgatctcttgctcctaagttcattaaattcctctcctctattaataaaatagcttttcttaacttcaaaagtcttttagatcaataaactacaatcaaaattatttataaatcttttcagacacttttatatagatagcttatttcaacatattatactatagttagtttagtgattttatagttaattatatacaatttcatatactggaacaataaatcaagaaatttatatgtattattgtaattaaatttctacattctggccttaatcaagccctcatattactagagctttaaatgaaaatttattattgcaacatgtatagtaaatttttatatgcactaaatttttctatgtcatctattactaataaagttaaaatatttcttaattaagtgatatactaattttaataaatattatagaaagaaggattaatatgataaaaatagtggccaaaagtgttattaaaaatgaacaaatagaaaaatatctaagacttgcgaaagagttagttgataaaagtagaaaagaagaaggctgtatatcatatggcttgtttcaagatattaatgatagttctatattcacctttatagaagaatggaaagatgaagaagcaattaatttgcataataacagtgagcattttacaagaatagttcctttactaggtgaacttcgtgtaggcaatggggaagtaaatttatacaaagaaatataaaaatcccaaggcaccttcgtaaggtattgttaatcactggatccctaaagtaaacttaaagttatatacgtaaataccgaaaggaaggtcattcatttgttccaggttgctggagtatttagccgtgaatttccactagaagaagttgcaccatttctgcatgttcccgaggcaatctcgtgacaagcaataaataaaacaacttctactaaggaaatatctacagctaaaaactcaatgcaatacttctgcaaaagtatgaccttcctttctagtgtagactataattaaaaatatatattttactttaggctcggtatctatgtccgaaataactaaatgtatatgtgaactacttaaaggtgatagtaaaataaagaaatagaatacatgtattctatttcgattgtttatcgatttgctttaagttctttacaatactttaatatgtgcattattcttttccgaaaacctgttctttaagctttagtcctgttttagttacagctattccgcctaaagctgtttctctaagtgattctggcaagctttttcccaccttatacatagcacttaccgtatcgtcaaatggtatttttgaagctacacctgccattaccatgtctgccatacataaagcagttattgctccttgtgcatttctcttggcgcatggtatttcaacaagtccagcaactggatcacaaacaagtccaagtacatttttaattactattgctgctgcatctaaactcatctcaggagttcctcccatcatctcaacaacagcagctgctcccatcgcggaagctgacccacattctgcctgacatccaccttctgctcctgctagtgttgcatttaatccaataatcattcctacagcagctgcggcaaataatccatttataagtccttcttcatctaatccaagtttttctccagcacttaaaattactgctggtaatattccacaagaaccagctgtcggacatgcaactatcttacccatagacgcattaacctccgatgaagaaagtgccatagccatagccatattggttacatcacctgtcaaagcttttcctttcttaacataattatgtatcttaaaagcctctccaccaattaagccactaacagaataaacttctttctccattccctcattagctgctgaaatcatgacgttcaaatttttcctcattttatctattacttcatcccttgttaatcctttttcctccacttcatatcttattgcatattcacttaatgaaatattatgttcttcacatatttctaacaattccatacctgtttttgcaaacatattattcaccttcctttgctgggcttattgaaattacattatgtactaactctatttccttaattttctctattaaaatattattcactttattatccatctcaaaaatcattatagcttcatgccctttttgctgcctgaaaactctcataaaggctacatttatattttcactatataatatacttgtaacactattaattacccctggagcatctttatgagctattattaaagtttcataaattccagtaaaatcaaccttattattattaacttctacaacctgaatattcccaccgccaattgatgatcccataacttcgcaatattgaccaccaattgttttcataataaattttactgtattaggatgaacatcccctaattctgcctccttaaataaaaatttaacacctttttcttttgctatatccatagaatacctaagtttttcatcacttggttccattcctaaaataccagcaactaaagctctatctgttccatgacctttatatgttttagcgaaagaaccatgtagtaaaaatgtcacctctgatacgtctccacctgctatacttcttgctatcttcccaagcctcgctgcacctgctgtatgtgaacttgatggtcctatcataataggtcctaaaatatcaaaaactcctatttccttcattaatttgatatcctttctctctaatatcttctattctattttgtttaatcttatatttattaaaccataaataataggcattgtgaataaataagaaaaatattaaaacggccgaaaataatttagtaatcaatttgttatttaactatataatcattaaaaaacaccttgttatagtactaaaatttcaatcaactataaaaagcaataaataggtttattttacacaaaactacttactgttctcattattatacaaaaccacaatgtcttttaaattttgcttaataaaaactctaatgcaattttatatctatttaatacattttcatggtgatcatattcatcccaaatcatttttatatttttttcacctattcgctttttaaatattttataagatttctctgaaaactttggagcatctttatgaatagtggttttcttataaccttcttttctacctgcaattaatataagcttaaaattatcatttactaaatcttctttatctacgaatttaatccaattttcataccattgagatgcacatatacttgcaattttgctgtaattgtcgtttttataaactgaatacaaagaaactaatgctccaagggaatatcccataatttttctatattccttattcacacttactcgaaactcattttcaatataaggttgtaaatcttccaataaaaatttcaaataattatctgcttgtcctccaaaatcattaaacctttcattcagtgcctttgaaaaccaaggtgtgtattcgcttattctatcaattggggtgattccgactaatatatgctcttctaataattcattagaaattcctatttctatatcctctattattttggttaaatatcctttaaatttatctccatcttgaacatatactatggggtaccttttatcagaaatatcatatccaactggcaaataaataaatatttctctatcaaatacttttcttgttaaaattgttcctttcatctttctttatcccttctttaatttgcttggagaaactccaaactttttcttgaaaagtctgctaaaataaaactcatcattataaccaactttctttgaaacatctttaattgttaaacctttatttaatagcgtataagccattgtcaatctatattgaattagataatcaatcggtctcatttttaaatgcttattaaataaatacgatattctgctaactttctctccatatctttcagatagtttattcaagttaatctcctccatatagttttccgaaataaatttacttatatctgccacaatatctttctccgttagtatttttttataattttgctctgtgaaaagttcctttaaaaataaaaatgtttgtatttgaagtgtcactcttgatttcatttccaatttagaggatatttccataagttgatttaaggatcttattatctcatcgtagttatttatttgaaactcaaacgttgatttcatataagaatttgaattattatatttatctgctacataataaatatttatatgttcaaactcttcctctcctaaaaccttaaaagatatgtttctatttttacatccatgaattacttttcctctttcccccgtaaatatctcattatcaaactctatttccgcccttccttttataggaaaaataaatgctgaaagattcgttttataagtattttttatacctgcagaatgctttgcgaatttatctactcttacaatttcaaaagtattctctctaaattcctttattaactcaccttttataacacttttcaattgattcatcccccttcgaaaacatggacaattattaaataattgtccatgtttttatttttgtttattcttttactatttctcatatattataatccttaatataaatgagaattattatcatttatatcgttacatttagtataacttactttttgaatctcttcaagaaaggatgttaatatgcaagacattttaaactcttcatatgaaaaaaatctgaaaatcaagaaatcttttaatctatttattattgctttaataggactattaattatttcagtaatattatcagtttcctttggctcttttaaaataaaaccatctatatcatatagcgtaatccttaataaggtttttggagcatctttaggtggtactagccttacaaacacttcgtcaacctataatgttatttggcttattcgtatgcctagagttttacttgctattgctgttggagctggacttgccgtatgcggtactgtaatgcaagctactgtacagaatcccttagctgaaccgtatattctaggaatttcttctggtgcatctttaggtgctaccttttccctaatgcttggtattggttcattaagctttttatctattaacggtgttgcattttgggcatttttaggtgctttaggagcttctgttttagttctgttactttcttctttagggagtaagatgtcttctactaagttagtgctttcaggaactgttattagcgctttgtgcaatgccttatctaatttcattatttccatagcaagtaatgctgaaggtatgcaaagtgttaaattttggaccatgggctctttagccacagctaaatggcaaaatataggattggttatcttatttgtttctgtaagttgtatcttctttatgactcaaggacggattttaaatttaatgttaatgggtgatgaagcatctgtaacaatgggtctgaatttaaatctatatagaagaatgtatatgataataacttcactactaaccggtatactagtcgctaattgcggggttataggatttgttggacttatcattcctcatatttcaagagctttagttgggtctgaccataaaaagctaatatcaacctctatgctcctaggctccatatttttagtttgggcagatatattcgctagaataactattcctaatggagaattatctattggtattattacaggcctagttggctctccattttttgtttatatcttattaagaaagggcttcggttacggagacaaataggtgacttaaatggacttgataattaaagatttaaagattaatttatccaaaagtgaaatagtgaaaggtattaatttagctgttactaataataaatttattggtttaattggtcctaacggcagcggtaaatctactttattgaaatctatatacggtgttataatgccaacttatggagatatttatatcgctcataaagatatacaagcttatgacaaaaaatctctagctaaaactcttggagtagttagtcagtttaataatattaattttgattttaaagttatagatatagttttaatgggacgatcaccttataaaaaactattagaaaaagacagtaaagaagattatgatatagcacttaaagcattatcatcagttggaatgcttgattcttctcaaaatagctttagtcttttatctggtggagaaaaacaaagagttatattagctagagccataactcaagaaccaaagatattaatattagatgaacctactaatcaccttgatataaagtatcaattagaggttatgtcaattgtaaaaaatctaaatatttgtgttttagcagccttacatgatttaaccttagcagctcaattttgtgatgaaatttatgttctgaaggctggagaaattgtaactcatggtactccaaaagaagttataacaacagaaatgataaaaaaagtttatgatgtaaattcatatgtatacataaatcctgtaactaagagactttcaattgatttctatacagatgatttacaaacaaagcaaaattatacttagcaacataacaacttaacgtaatatgtttaagttttactaaaaaactaggaggaatatttatgaaaagaaaatttttacttttgattgcaactataatgcttactactgctatatttacaggatgtggaagtagcgcaaatacaaataatttatctgaatcagaaaagtcttcaaatacacaaaaagcgtctgcatctaaaacttcttatcctgtaacctttgatgcttttgattcagaaggaaaaacatataaacaaacttttaatgatgcaccaaaaaaagttataactaataatcaatcctcaacagagcttctattaactttaggattaaaggattcactaattggaacaggtgatttagacacaccaatcccagaagctttaaaggatgattatgaatctattgctgcgatagctaaaaagggagatgctgctaaagaagtcgttgttggatctggagcagatttagtaattggaagagcagcttcttttaaggatgataaatatggatcaatcccaagcttaaatgaagttggaattaatacctatgtccagtcagcaagtaggatggatactaatattactttagatacaatcattcaggatgttagaaatgtaggaattatctttgatgttcaagataaagctaatagcttagctgattccatgcaaaaatctttagatgatatagaagcgaacgttccaactaatgaagcaagaaagaaagttatagtaattgttaattacggtgcagattcattttcagtatatggcgctaatgcttcattacaaacagaaatgctcaacgttttaaatgctgataatgttattgaaaaaggtggttctggttccttagaaaatatcatttcaactaatccagatcacataatttatgtaacagcaactaaaaatgcatctacagatgctgatgctgtaagcaaaatactatctgaaccaacacttcaaaatgttactgctattaaaaacaaaagcattatttgtgttgattatacagaatttatgggatatggatatagaacttttgactgtttagaaaagttatcttctgctttctatccagaaatattcaaaaaataaatcataaaatgaaacttttcagatggagttttatatatagggagtattacggatactaactatcagataaatcatgtagaaactaaataaaaagtttatgtaagggagaaattaaaaatatgttaagaagaattacaaaaatcgcaagtttattagtagctatggtttcagttatgccaattgtacctgcaaaagctgctgaagtaaaaaaaatagacgcaactgagggtactatctatagcgggtatgcaaaaggaaatggtatttatttcactggagaaataaacggtaaggatgaagctgcatattatatatctgaagatggagaataccataaaattgatggacttgatgctggatatgacgcaactaatttattaataaataaatacttagtacttgatgatgataattatgtagatttaacagataattacaaagctttaaatggaaatattacagaagatttagaagatgaagctgaaacaattgtaaggaaaaaaataagagctgataatgatagaagatttgataaaagttcttatgatggatcaaaaataattgaagctaccatggaaggttcagctaaatttttaagcggtagcaatggactagcaatttatgactataccttaaaaaatccaggcattaataaaacaaagtctacaatttattcagatttaaaaggtaattatgttgatgcagattataatttaggaagcctaaaagtatgtacaactagtgatagtgttattattaaaaatactgaagatacctatgagataaaagacaatactaaagcctatgagttaaaagcagagcttaaagaaaagaaatatatcacgagtgttgctaatacaatatatagatatgccgatcttacaatatacagaaaagaaaaaggagctgatgatgctacttacgtacctgtaacaaatgagttagggtttggaaaaaatggttataatgtaactagtggagattctgtaaccgtattacaaaagtttttgaatgaacctgcggcaaatgatatagatggtattaaatattctaagaattcatcaatatattttattgcagatgaagatggaaatgaggaatatttattaggaagatcagcagcagatgcagtagcaaaagttggtgcagctactggtggaaaagcaaaaatagcaggaagcgcacaagctctttatggtacctatttagatgtcacaaataaaaaaatatattctgagactcttaatttaaaatctaagaatggatttaattatatagatattggtgattatgacagttcagatacagataccttagatcaaataccaacaccaaatgggctagcttgtttcttggatgatggatatataaaaatctgggatggtaacgaaagctttgtaaaattatataaagtagatggatctatggatgacttttctattagcactaaagataatttaattgtctggaatgaagatgatggagtttattcagttatacataatataactaaaacagcagctgctacaacagacaactctatcccaactactgctggatgggttcaaaatgtagataatacttggaattacattttagaaaatggaattaaaaagactggctggctagataataatggtacttggtacttcttaaactctgaaggtataatgaaaactgggtggattaatgataatggtacttggtacttctgtaatgcatcaggtgctatgctatctaatacaacaattgacggatatcagttaggggcaaatggtgcatggataaactaataaaatattgtattagcaaagaagcgttatatagtagtccttctttctgactataaatagagtaaactacaatacctaaactctttgtaattacaacagctcttcattctttaagaacactcagtaaagacaattcatctttatgaatatgattgctgtcatattcatgaatattgatgcataaattaaactttttaatcttagtattatatatttatttaaatcgttacctgacaaccaagtgcattttcctaaaactcatatttgattaaaaagtgaaagacgtcatcaatacctttatattgataacgtctttcactaagttattataaatcttactttctttgcacatttcttgtcgcaactatatcaacgccagttccaagaacatcttttattacaacatctcctattttaacaggagcctttattgttattttatttatttcttccatgcatttgaaattaagtcctttaggaattggattatttgttttaacaggtactactggtaattctccattttccactttaacagttgaagttattactcttacaggatttgtaacttcatttattccatactcaatacctctattacagccattaccttgtacacttttattttcagcatctacttttaaatgacatcccttagggcaacatatacaaattaattctttttccattttattcaccatcctctaatgatattgttatatcacctttaactttctctaatagcaccttacttaaaactaccttttccatttctgatggtgctaagtgagctcttttaaatttagctataacttcatcattgcatcttacaactaatgccttattatgatatatgttatttactctcataaatacagttaatttatcatcaacagcttctgcattaactttttgtggcactgtataatttatatttgcaccatttattatgtttacatatttgtctttcttaagttcacccttaatgtacttagcagcagaaaaacctgcgtgttttgactcttgagttacaaagtcaactaagtcatgaacatgaactacattaccacatgcaaatattccttctactgaagtttccatactctcattaacaattaaaccattagttcttctatcaggttcaagtccggcattaaatgatatttcattttctggaattaatccaactgatagtagtagtgtatctacatcaaattctttctcagttcctttaataggtctcttattttcatcaacttctgctattacaactttttcaagtctcttatctcctacaatatctacaactgtgtgtgataaatatagaggaatatcataatcatttaaacattgtactatatttctgtttaatccatttgaatatggacacaattcaactacagctttaactttagcgccttcaagagtcattcttctagccattataagtccaatatctcctgatcctaaaataaggacttctttaccaggcatatatccttctacatttatatatctttgggctgcacctgcattaaatacacccgctggtctatcgccaggaatatttatagcacctctagttctttccctacaacccattgcaagaattatagctttagccttaagttccatatatccttcttctgtatttattgcataaacagttttatcttttccgatttctaataccatagtgtctagtttaacttcaacattagtatcttgaatcatttcaatgaatcttcctgcatattctggtcctgtaagctcttccttaaaagtatgaagtccaaaaccattatgaatacattgatttaatataccacctaattctttatctctttctaaaattaatatttttttaattccactattatatgcttcatatgctgccgcaagaccagctggtcctccacctactactattaattcataactcataataacacctcatccttctattttgtcttacctaataatatatatgaacctgatttttcttgaactacatcttcaagtgggacattacattctcttgctattatttcctgaactcttggtccgcagaatccaccttgacatcttcccatccctggtctacatcttcttttaatactatctaaggatggtatccctatacttctctttattgcatctacgatctcaccttctgttatgctttcacacctacaaaccattcttccatattgcggatttttctttattaattcagctttttctttggctgataattccataaaatgaatttgttctctttttgccttaaagtctgattttttatctaacttacatcctgattctttcaatatttctacaacatcaagagctatagctggtgctgaagaaagaccaggtgatttcattccggcaacatctatgaaaccttttacttcatcattttcttctactataaaatcacctgtatctggattagcacgaagacctgcaaagctccttattatttctctaaaattaactttattagttgtacgcattgaagcgtctcttacttcatttaatccttctgctagtgttccaacatcatctttatcttctatatctctggcatcaggtccaactaataaatttccatgaacagttggagtaactaaaactccttttccaagttttgatggacattggaatattgtatggctgactacatttccttgagttttatccattacaaagtattccccgcttcttggtactatcttaaagctttctttgcaaactaaattatgaattttatctgcataaagtccagctgcatttattacaaattttgattctattatttctccatctttagttgtaattttaaatgtatcatttttttctattgcaacaacttctttttctagcttaatttctcctccattagctactgcattttctgctagtgcaattgtatattcaaacggacctactataccaccagttggtgcatataaagctccaaaaatttcttgattaaggtttggttccttttctagaacctgttctttacttaaaatttgtaaatcttttacgcctatttttgtcccattttcataaagagcttgtactgttttcatatcttcatcgttaaaagctattatcagagatccgtttctcttaaaaggtacacttaactctttgcaaagatcttcaaacatctcatttccagctacattatattttgccattaaagtaccttctttaggatcatatccagcatgaactattgctgaatttgctttgcttgttcccatcgatacatctttttctttttctaaaacaactacttttaaattatacttagttagttccctaaaaatagaatttccaataacccctgatccaattattgctacatcatacatattacatcctccttattaatagcgcataaaaaaagtcaagctaaaaacaaggtgtaatccaccaacgttttcatgcttgactctatattctctcagcatttattttaaattatatatacattatatcatgtaaatgtatacttgtctactacttatcctaaattcttaattttatttactatccaaaatctacaacactactttattttaaaatattactttaaactatgtaccctagatggtataaacatttagggtacattataattcttaaaatttgtgattaggttaagctaatttgaaatatatcaatacttattaaagtatcattctattcctcttcccagccttctgctctcttaacggcttttttccatcctttatataatttttccttcttctcttctgctaagtttggagaataagactgacttacagcccacttttcagctatttcttcttttgatttccagaaacctacagcaagtcctgctaaatatgctgcaccaagagctgttgtttcagttataataggtcttacaacctctgcccctgttatatcagcttggaattgcattaataaattatttctacttgctccaccatcaactttaagtcttgttaatttacatcctgcatcctcttgcattgcatctataagatccttagattgatatgcaatagattcaagagcagctcttattatatgatttctattagcacctcttgtaagtccgaagatagcgcctcttgcatacatatcccaatatggagctccaagtcctgtaaatgctggaacaacatatacaccaccattgtcttctactttctgtgcaaaatactctgtatctgctgcatcagtaactaacttaagttcatctctaatccattgaataacggcaccaccaacaaatactgaaccttctaatgcatattgtacttttccatctataccaactgcaatagtacttactaatccatttttactatgaatcattttttctcctgtattcataagtaagaagcatcctgttccataagtatttttaacactaccttcttcaaaacaagtttgtccaaatagagcgcattgttgatcccctgccatacctgctattggaactctaacgcctcctgttcctccaagatttgtgtatccataaacttctgatgaatttttaacttctggtaacattgattttggaatgttaagcttttctaggattctttcatcccatcttaattcctttatattataaagcattgttctagaagcattagtataatctgttacatgaaccttaccatttgtaagtttccacactaaccaagtatctactgtaccaaataataattcacctttttctgctctttctctagcaccttctacattgtctaaaatccattttattttagttgctgaaaaatatgcatccaaaagtaatcctgtattttcttttacatattcactaaattctttgtctagtttaagttcttctattatacctgctgttcttctacattgccatactatcgcattgtatactggttctccagtatttttatcccaaactattgttgtttctctttggttagtaattcctatggcagctacttcttcttgagttatattagtttttgcaataacttcttgtaatactccatattggcttgcccatatttctaaaggattatgttcaacccatccttggtttgggtaaatttgagtaaattctttttgacttactcctaatatattttgttctttatcaaagattatcgctcttgaacttgtagttccttgatctaatgctaatatatattttttcatacaaaacaccctgctttctaatatttatatattctaatatttacctagaaaaggttaaatttattatttatattttaggaaatgaatttaacaaatggttgaccttaaaaaattgagttaatgttctagacgtaattttagcgacaattaaagccacataaaacatccatttatacagaagcaataatatttatttttactgcctcgtacaaattttaaatttactcagtccattaagtgtttcccaagtaatttcagttttatgtggctttattctctaattctcttcagcctacatattccaaatttcttttttagttgtagatacgcatgttgctcctgaatttaatgcctgcattacctcttccttagtttcaattagtcctccagcaacaactggcttactagaatattttgaaataatttcaattacttttggaattattcctggaagtacctctattgcatcgcattcagaaatcatatgattttttacattgtttaaagaaagtgtatcaaatataaaaactctttgaactcctagtaaattatacttttttgctagttttacaacttgtggctttgtacttattattccactaaatttagtttcttctttaatatactttacaacaatttccttattcgtaaatccttcaaccaaatctatatggattattcctattttatttctagatgttataatttcacttatctctttaatattcattacatctccaaataaaacaaatataacttgagcttctgaatctaacgcctgatttaattgttcttcattttttactgctgctataattggattttcttctaataactcttttatattcattggccctcccatgtaattgttttcttttttattcttagtattacatagttgtttgtctctgtcaattctaactattaattaacttttataatattccatgtaacattacataaaataatgcagctaaagttcctcctacaattggggcaacaacaggaatccatgcatatccccaattagaatctcccttatcaggtataggtaatactgcatgtgcgattcttggcattaaatctcttgctggattaattgcatatcctgttgggcctcctaaacttacaccaatagccaaaattaaaaatgctacaaacaatgttcccattccatttgatagattttgatctcccattcctaaaattgcataaactagtacaaatgttcctacaagctcagttataaaattaattgaagtattctttacttgagggcctgtacaaaatacaccaagtttgcttcctttatcttcagtagctttaaattgatcattataaacaataaataccaaaactgctcctaaaaatgcaccaatacattgtccagctaaataaatcggaacttgagcccacgatactttacctattactgctaacgcaattgttaatgctggattaaaatgagccccactataacttccaaaaattaatgctggaattcctaccgcaaaagcccatcctattgcaattactattaatcctgctcctgatccacctgatttttttaatacgacattggctacaacaccatcacctaatagaataagtaataaagtacctactaattctgcgaaaaaaattgtcataacattatctcccttctacttcacaatacttgtttgttttttaacattttagaacggttaatattactagaaaacaacacattacataatattcataatttattttagtatgactaatttaaaagttttaaatcaatgtacatccagtaattttggccataagtatagccacataaaactccttacattttaaacaatcatatatttctaactgtttaaaacataagttttaaatttacttggtaatcataagatttcctaagtaaacttagttttatgtggctttattctctatttctctatagcctacatttctaaaattttttcagaactgcaatgtaattgttttcttgttagatttagtatcacatatttactttatagtgtcaagcttagttaataatataacaattaaaatcaatacatattatttgctcattcattcttaattacttgactgccaatgcatcttatttcatacctaattattgtttcttattttcttcttttaatccttatttttacaatcaaacattgttaatattttatctattataaatttatcttaagaacacaagaactatagataaatgttcaaatttatctatagttctatataataatattagtgaaataacatacttaatttaatattcataaaaagctgatcctccgataaattctcttaacagagaattctttggcacttcatcaacattaatctctttgaaaaagttcaaaaacgattttaatcttatagcttctgaataaactgaactttcttccgttatttcatctagctcttttaatgcatatggctttaaaacgccgagttcataaaccaatgtagaattaaatgctacatccgcaccttcttgataaacaaatatattatttttttctcctttctttatagatttccacatttttaaagtttcttccgccttatatcctcttgataatgaatctctaactattcttctcacctttcgtacatctgttgtagaaattctattatgattatctatatttagctgtgtcaatgctgatatatatattttaaatacattcctatttaaattgcttgaaattaaatttggatttaaaccatgtatcccctcaagtatcaaaactccatttttaggtaatttaactttatagtcattccattcttttttcccagttttaaaattataactaggaagatccacttcttctccgctcattaatctttctaaattatcattcaacaaacttaagtccaatgcatcaatagattcatagttataatctccattctcatcttttggcgtttcttctctatttacaaaatagttatccaaggacaatggtataggtattaatccattcactctcaattgtatacttaacctattcgcaaaagtagtttttcctgaggatgatgggccagcgataagtataattttcacatcttttctatctaaaacatcatcagctatattagctattttcttttcatgaagcccctctgaaaccataattatattttttagttcattattaagcactttttcatttagagtcccgacatcttcgattcctaaaatgtttagccatctttgagtctctatgaaaatttttgttaagctcttttcttctctaaattcagctaattcacttagattagtctcttctggtctctgtaaaatgaatcctgattcatacttaaatacatcaaatttatttatgatgcctgttgaatatcccataggaccataaaaataatcataccttccttcaagctcataaagatgaacatgctttatatcacaatactttaaaagcttaactttatcgtccatcttatatccttcaaaaatcttaatggcttcttcttttgacgttctcatactcttaattggtacatttctatctattatttcttgcatcttgacctttatcttatcaatttcacctttacttaatggattttccttatgaacttctccatatactgccttacttatagcatggtctattgttatcttcgattctggaaataaatccaatgctacctttataaatataaactgtaaagttcttgtgaatattttcattccaagttctgtgtcaaagcctattaattctacttctccatcatcctctatcacttcagttaattcacaataccttccatttaatttgcatatagctatatctttaaccctatctttgtaattacccataattaattcataaaaagtcagtccttttttagctttaattttcttatctttaaattcaatccctctacactccatactattcaaaccttcctttatataatttgattatccctttagattttaatttcacaatttgaaaattaagctctccgtctctgtaaagtctcttattctaattgtattcaaatatttgggtaccataataatcatttcaaatatattatatacactatttccaaaaaagataaacttttttgttaagtctataaaataaaataccaattataaacttaccatgaaatgttcttatttagcatggttgcttttttctatggcgaaatgttcttagttgcagcatagctgcttttttatatggtgaactgatcttgattgcagcatagctgcttttttatatggtgcgtatattaattttatttttgtaaatattattttcgaggtgattttttaatgtttgtagtatcaatcagaactgctattttatatttattggttgtattaactatgaggctaatgggaaaaaggcaaataggagaacttcagccttatgaatttgtaataactattatgatttcagacttagcatcattgccaatgcaagacacaaggctcccattattattaggtattataccaattataacattgctatttttaaaaacacttttaacacaaataggattaaaatttcaatatacccgaaagctcgtggatggagagccctgcatattggtccataaaggaaaaattaattactcaacgctaaaaaagcaacaattaaatatagatgagctactagaagagttaagacttgccaattattttaatcttgatgaaattcaatatgcaattttagagaatgatggtcaaatatctatattaccaacagattataattcttctaatgcatcaaattcaggaaatactgctcaaaatactgaagcaaaattgcccaaagtattaatttccgatggtgaagtaaataaaaactcactaacttccatgaataaagatgaagaatggatatctaatctacttaaaaagcacaatattaaatcaataaagcatgtccttattgctttatatgatacagaaggcaaatttaaatatcaactttttgataaatacgaaaaggaggatgcgcaatgagaaatgctataatatcaatacttttgtttctcctaactatgtcatgcgtatattttttaaataagtctgtcattagcttatgcgataatattgaaatgcaaactgaagatatcgaacttaatatcgcaagtgacaaaatggaggatgcctattatcagtctcttgaattattaaatactattcaagataataatgttttaacatctctttatcttagccatcaagaatttgataatttgctaaatgaagctttaaggttatctacatatcttgttcataaagattcaactgaagcgcatacatctctacatttagtaaagcataatactgatcatctaaagaagttacaatctccaaatttcgagaatattttctaatagaacattgacatgcaaacttttattatatatacaaaaatttcgcatatataaacattcactttattcgcacaattatgcaccacaataattcatgcataaaaactagtgctatttgcataaattattgttttttctgcataaacatcattttttaatgcatatttttaatatttttatgaatattttttcattttatacttgattattcttttgcaaaactgtataattataaacatcaattaggtattataaatcagattaatttattgattatatttaagaaaatagcattgcatgtatgtttatgcattttatatgattatttaggagggcttttaaaatgataaaatataacaaagtagttttagcttattcaggaggactagatacatcgattattatcccatggcttaaagaaaattatgggtgtgaagtaattgctgtatgcggaaatgtaggacaaaaggacgagcttgatggattagaagaaaaagcaataaaaacaggagcatcaaaattatatattgaagatttaactcaagagttcgttgatgattatatcttccctactattcaagctggtgctatatatgaaggtaaatatcttcttgggacctcatttgctagaccaataatcggaaaaaggttagttgaaattgctaaagcagagggagcagatgcaatttgtcacggatgcacaggtaaaggaaatgaccaagtaagatttgaaatggcagttaaagcatttgctccagaaatgccaataattgctccatggagaatttgggatattaaatcaagagaagatgaaatagattatgcagaggctaaaaatgttccattaaaaatcaaccgtgaaacaaattacagtaaagataaaaacatctggcatttaagccatgaaggtttagatttagaatttcctgaaaatgaaccacaatatgataaaattttagaactttgcaaaactttagaggcagctccaaatgaggcaacttatataacattatcgtttgaaaatggaattgccattgctttaaatggtaaaaaaatgaacagcgttgaattactagatgaattaaataaaatcggtggagaaaatgctattggtataactgatatggtagaaaacagacttgttggtatgaaatcaagaggtgtctacgaaactccaggcggaactattctttataaagcacataaagatctagaagaactttgcttagataaggaaacagctcattataaagagcaaattgctttaaaatttgctgatttagtatataacggtcaatggttcactccacttagagaagcattaactgaattcgttaataaaactcaagaaacagttacaggagaaattaaattaaaattatacaaaggaaatattgtcaatgccggcatgactagcccatactcactatatagcgaagaatatgcaacttttggagaagatggagtatacgatcaaaaggattctgctggattcattaatctatacggtcttccaacagttgtaaaagctaaaatgcaagaaaaaattaagaaagaggaaatgtaatgaagctttggggcggacgattcaaaaaaggcactgacaaattagttaatgattttaattcttctataaatgttgatagcagaatgtataaagaagatattgaaggcagtctagctcatgcttccatgcttggaaatcaaaatataatttctaaggaagctagtgatagaattacttctggtcttctagaaatattaaaaagaatggataatggagttatagaaattgatgaaacttctgaagacattcatagttttgttgaaggtactttgacatattacattggtgaatatggaaaaatgcttcatactggaagaagcagaaatgaccaagtaactttagatttaagattatatttaaagaaagctataacatcattaaaacaagatataatagctttggaagaagttcttttagaaaaagctaatgaaaacataggtacaataatgcctggatatactcatatgcaaaaggctcagccaattacatttgctcatcatcttttagcttatgctgaaatgtttaaaagagatctaggaagactttctgattgctataaacgtgttgatgagatgccacttggatctggagcactagcaacatccacataccctattgatagagaagctgttgctcgtgatcttggtttttcaaaggttacactaaatagtttagattctgtctctgatagagattatgctatcgaaacactttcttgcctttcaatgataatgatgcatttatcaagattttcagaggaaataattctttggtgtactaatgaatttagctttatcgaacttgatgatggttatagcactggaagcagtattatgcctcaaaagaaaaatcctgatgttgcagaattagttagaggtaagactggtagggtttatggcgatctcatgactttacttactgttatgaagggaattcctctcgcttataataaagatatgcaagaagataaagaagctctatttgatggattagatacagttgttctttcacttaaaactttctgtggaatgattaaaacaatgaaagttaagaaggaaaatatgagaaaaggtgctggtcttggatttactaacgctaccgatgtagctgattacttagtaaaaaaaggcatgccatttagaaatgctcatgaagtagtcggagaaatagtccttcaatgtattaaagataacaaaatgattgaagaattaactatggaagagtttaagaacttctctcctacatttgaagaagatatttaccatgctatagatttacttacttgcgtagaagagcgtaaagttataggcggtccttctacagaatcagtaaaaattcaaattgaagcattaaaaaattttatagcagaaaataaagaagtttaataagattagtaattataaagaaaaaattcaatatttttttccttgtaataatagcagccgtaacattctcagataacggctgctaagtcttagactaagtacttccttaagtgtacattaatatcactcgaggtataggtttaactaagatttagatgaaaatcatcctctgaatcaagttctactttataaaaactttcaattgtctatgaaatttctaacacgaaattttatagacaattgaaatactatagttaagaattaacatgcagaaaataaataatattattttgcaataatcaaataaacaagggggctatttaaaattggttaaaatcggaataattggtgccacaggatatgtaggcgctgaactcttaagattattattatctcacccaaaggttgaagttgcagctttaagttcagtttcttttgaggggcaagagattagcaatatatataaaaattttttaagcaaaacaaatctaatttgtgagtctgcacatgatgttgttgaaaagtgtgatgtaatcttcaccgccctacctcatggattaagtgaagacattgctaaaaaagcactagacaacaagaaggtctgtattgatatgggtgctgattttagattatctagcgaaaaagaatatgaaaagtggtatggaaagaaattcacacaacctgaaatacatacagaaagtgtttatggccttccagaattaaatagagataagatcaaagaatgttctttaattgctaatcctggttgttatccaacaactatagaattaggactaatgccgttacttaaaaattcattaataaaattagataatattatttgtgattctaaatctggaactacaggcgctggaagaggattaactttaaatactcactttccagaagaaaatgaaacttttgctccatataaagtaggtgctcatagacatacacctgaaatcgaggaaacattatcttctatggcagaagataatgtaaatgtaacattcactcctcacctactcccaatcaatagaggaatagtttcaacaatttactgcattccaagagataaagtaaatcttgaagaaattcataaactatatacagaattttataaagatgaacgtttcgtaaatgtacttccacttggtgatacagcttcaataaaaaacgtgcgattaacaaacgattgtcatatatctctacacttaaatcatagagaagatcaaattattattattagtactatagataacatgattaaaggtgctgccggacaagcaattcaaaacatgaatataattttaggttttaatgaagcagaaggtttaaatctaattgcaccagctttttaattcatatcatttttaaatactaaaaactttaacagatttaattattaattatgcattgtgcatcgagcactgtgcattgactaagggggttataaatttggatataaaatatatagatggcggagttacagctcctaacggtttcttagcttctggggtacactgtggattaaagcaaggaagcttaaaaaaagatttagctttgatttattcagaagttcctgctgctgcagcaggaatgtatactaaaaataaagttaaaggggctcctatttacgttacaaaagagcatttatcaaacaaaagagcacaagcaataataataaatagtggcaatgcaaatacttgtaatggtgatgatggtttaattaaggcaaaaaaaatgacttcattgcaagctaataaactaaacttaaaagcagaagatgttttagttgcatctacgggagtaattggggttcctttaaatatagatgctattaaagacggtattccaatgcttactgaaaagttatcaaaggaaggttctaatgatgcatctttagctataatgacaacagatacttttcaaaagcaactagctgtagaattttatataggtgataagaaaattactatggggtcgatggcaaaaggttcaggtatgattgaaccaaacatgggaacaatgctttccttcattacaactgatctttctattgctccagaattgctacatgaagcactacaatcgagtgttggagtaacttataacagagtcagcgttgatggagatacaagtactaatgatatggtattaattttagctaatggcttagctgaaaatcctactataactgaaaaagatgaaagttataatactttcttaaatgcccttactgagttaaatacaattatggctaaaaatatagctaaagacggtgaaggtgctacaaaactattagaatgtcaaataatcggtgcaaagaatgaaaaagatgcagttgttttaggtaaaagtgtaataaactctagtttagtaaagactgcaatgtttggtagcgatgcgaactggggaagaattctttgtgcacttggatatgcaaatattgatttcgatcccgaaaaagttgatgttgcctttgaaagtaaggctggctcaataaaagtttgtgaatctggcagttctttacccttcgatgaagatattgcaaaaaaggttcttagcgaaaatgaaatagttattaaagttaacttatccttaggtgattatagtgcttatgtttggggctgtgacctaagttacgaatatgtaaaaataaatggtgattacagaagttaatcttagattataaatatattttaaacttattccaatgtacagttcttaatatgttaattatgaactgtacattctaaattgactgggggtattaacttgttgaatcatactgaaagagctgaagtattagttcatgcattaccttatatacaacgttaccgtggaaaaataatagtagtaaaatacggcggaaatgcaatgataagtaatgaacttagagaaacagtaataaatgatattatattaatgaaatgtgttggaattgaaccaattgtagtacatggtggcggtcctgatatttcagatttattaaatagattaaatcacaaaagtgaatttattaacggcttaagatatactgatgatattaccattgaagtagttcaaatggttttaggcggaaaagtaaataaaaatttagtttctttaatagagaaatttggaggaaaggccattggcttatgtggaatggatggctctcttttaaaagctaaaaaaatagaatctgataacgacttagggtatgtaggtgagataactaaggttaatacagaaatattaaaaactaccataagttcaggatatatacctgttgttggtagcgtagccttaggagaagatgataataaggcatataatataaatgctgatacttgcgcagcaaaaattgcatcagcattaaaagctgaaagattaatactgcttactgacgttccaggagttatgaaagatccaaaagatatatctactctaattagcacattaagattacatcaaatacccaaattatgccttgaagggataataaaaggtggaatgattcctaaaattgattgttgcgttgaagcaattagaatgggtgttgaaaaagcaactatccttgatggacgtgtacctcattctattcttttagagttattctctaatgagggtatcggaacaatgatttattaatcaaaatattaaaatattttagaaacttcaaataaatttctctaataatagttaatgatctaaagtttatactagatattattaactattgaataatttaaagggggcaattttatgtcatatgattttaacgaagcaaaagaacacgttgttaatagctatggtcgtttagatcttatactcactcacggcgaaggtgtttatctttatgaccaagatgaaaataaatatttagattttacaagtggaattggtgtcagcagcttaggatatggacatgaaaaatgggttaaagctactagtaatcaattaaaaacacttgctcatacatcgaacatatttcatactgaaccaagtttaaaacttgctaaagaattaactgaaaaagccaacatgagtaaagtcttttttgctaattctggcgctgaagctaatgaaggatcaattaaactagctagaaaatacagttacgacaaatatggtgctggaagaagtaaaattctcactctaattcaatcatttcacggtagaacaataacaaccctaaaagcaactggtcaagagaaatttcataagtacttctacccttttacagaaggttttgattatgtaaaagcaaatgatatagaagactttaaagctaagcttacagatgatgtttgtgccataatgctcgaagcaatacaaggtgaaggtggtgttatccctcttgatacaaaattcgttcaagaagtagtaaaagcgtgtaatgagaaagatgttcttgtaatatttgacgaagttcaatgtggtataggtagaacgggtaaaatgtttgggtataataatttcaatgtagaggctgatatagtctctgtagcaaaaggccttggtgcaggacttcctataggcggaatactttgttcctctaaagttgcagatgtattcaagcctggtgatcatggctcaactttcggagcaaatcctgttgtatgttctggtgctttagttgttcttgaagagatttgtaatgaacaatactttgagaaaatatataaaagaggattatttgtaagagagctaatagatgaagctaaaaatcctcaaattgtagatgtacgtggtatgggattaatgatcggaataaaggtaaaatgtgatcccgctctagtccaaaaagaggctataaaaaaaggattattagtacttacagccggtaaagatgttgttagacttctcccaccacttactataactgagaaagaattaaaagttggtatagacattattcttgaaattttatctagccttaagtaaattttactttggtatgaatataatctttatcgtatcttttggattttctccctaactgctcatttttcactttcttattgtttggaggcatatatatgaaaaaagacttactaaaaatggatgatctttctaaagaggaaattctggatattttaaatttagcagatcagttaaaatacgaacaaaaacatggcatagaacatcatcatcttaaaggtaaaagtttaggaatgatttttgaaaaatcatctactaggaccagagtttcctttgaagccggcatgtatcaattaggtggaaattcactttttttgactgatagagacatgcaaattggtcgtggtgagccaattgaagacactgctagagttctttctagatttatacaaggcataatgattagaactttctcacaagatgaggttgaaaaattagctaaatatgcatcaattccggttataaatggattaacagatgaagaacatccttgtcaggtactagctgatttaatgacgataagggaaaataaaaatatattagaaggtctaaaagttgcttttattggcgatggtaacaacatggccaattctctaatgattggctgcctaaaagtcggcatgaattttgcagttgcatctcctgagaattatactgcatctaagaaataccttaatagagctaaagagatcgcagaaaaagaaggcgttacttttacaattactacatctccacttgaagctgctaaagatgctgatgttataattactgatgtttgggctagtatgggcagagaaggtgaggctaatgagaggattaaagcctttgaaggattccaagttaataaagaattaatgactattgctgataaaaatgctatggtgcttcattgtcttcctgctcatagaggagaagaaatttcagctgaaattttagaagaacatgctgattcaatttttgatgaatctgaaaatagattacatgcccaaaaagctgtccttgttaaattaatgaaataataaaattatatttaatagaaaaatgatatacttgtttacttcgattgctaaaaaaaattgcaaagaatttctatcatttcaagataaaaaatttttcaactcacatacgttcaaacagtaaaagttttttatcttgaaataatgaaactataataatttttttctgatgcactctgcgcaaacaagtatatcatttttttatatttacacataatttaaatatttattttataaattattattaattttacaggcgtgatgataaaatataattatatgaataattgatttttaatttaactaatgataatttactcaacatatatttttagaggagataatatggatatggatttaaaagaaaaagtaaaaaaactcccttcttcacctggtgtatatcttatgaaggattcactgaataacgttatttatgttggtaagtcaaagaacttaaaaagtagagttggatcatattttataaattctaaatctcattctcctaaaattcttaagttagttcaaaatctcaaggattttgagtataaaattactgatactgaatttgaggcctttttgcttgaatgtgaattaataaagaaaattaagcctgcttataataggctaatgaaaaatcctaagtcatattcttacataaaaatagttcttaatgaaaaatatccgaatattgaaatatctcatgaatcaaatgaaacggatggaaacatttattttggtccatattcaagaaaaaacattgctgaaaaaggactttatggtattaaagaatactgcaaaatacaatgcagtattaatcagcgaaaaacttcatcctgttttaactactctctaggattatgtattggaatgtgtttagatactacaccacgagaagagtatcttaatatattaaataaaataataaatcttcttaatggtaatgataaaatcattctccaggaaatggaacatataatgaatagcgcttctgaaaaatttgattttgaaactgccgctaaatatagggattacataagctcagtaaattatttgctagagaaaattaaaattatcaaatttactaaaaagaatagaaatattgctttgcttgaatatttagataatgacagagttaaattttttcttattagaggaaataagatactatttagtgaaaaatatattttaaaaaactttgatttagaagcattcaaaggtattcttaaagataatattttattttactttaacaatggagatgttccaatagaaattggaaaagaagaaatcgatgaatctcaaataatttacacatatttaaaaaataaatctaatagctgcaaacatattataattccagaggaatggttaagcgttccaaataattatataaatatacataatatccttaataaattgttacctagtataaaaaatgatacctaataataaaattgtgcctacttgttcgtaattgtacaagtaggtataattattatactaagttcatttaactaagtataataatttataaaaggagattttaactatggaattaatgaaagcaatcgcaatgcgtaaatctactagaagctataaatctgagcaaatcagtgatgaatctttaaatactattattaatgctggctgtgcagcaccagtagggatgggtgcatataactcagttcatctaactgttattcaaaattccgacttattagataaaattacagcagttactgcaaaagtatttggaaatccaaatatgaaaccattttatggtgctcctacattagtaattgtttctgggaaaccaaatgagaaagctccagctatcgaagtagctaacgctgcatgtatagttgaaaacatgtctcttgctgctactgatttaggaatcggtagtgtctatttattaggttttctatttgctctttctagtgataaggatcttctaaaagaattaaacttaccagaaggttttgtaccagcagctgcattagcattaggttatccaactgaacctctaacaaaagaaaaagacttaaaacaaactattcaaataaacacaataaaataataattaagacataacatgaacttcaattcaatagtggattattaaaaatttcatataaatttgttcgattaaatagtgaggtgtgaaaatgaaagtattacttattaatggtagtccaaaagctaaaggatgtacctataccgctttatgtgaagtagccggtgaattagaaaaagaaaatattgaaacagaaatctttcaaataggaaataaacctattagtggctgtattggttgtggtggctgctataaaagtggtgaaggcaaatgcgtatttagtgatgatatcgtaaatatcgctttagagaaagcaaaagaagctgatggatttatattcggttcacctgttcattacgcagctccgtcaggttcaattacatcttttttagaccgattcttttatgctggaaattgctttgcacataaacctggtgctgcagttgtaagttgccgtagaggtggggctgcttcagcttttgatcaattaaataaatattttactatttcgaatatgccggttgtttcttctcagtattggaatatggttcatggcaatactcctgaagaagttaaacaagatttagaaggaatgcagacaatgagaatgcttggcaaaaatatggcatggcttttaaaatccatagaagctggtaaaaaagcaggtatttcattacctgaaagtgaacctagagttgcaactaattttattagataactctattttagaaaaaggatttaataaaagatgtattttcttaacttttattaaatccatcttacacttatcaattaattaaatatatatattacaattaagcttctgtactctatttttaatttattgcttctttattaaagttttaaatataaacatactaacacaacatataacttctttaactatactatatttctagtttctaccttaatccctatcttataattgtttcccgttagtagaaattacatttttaaaccactcaaagctctttttcttatacctttttaaatctctcaaatctgattcatcacgatttacaaatataaatccatacctttttttcatctcaccttgtgaacttaaaatgtcagtgcatccccaagttaggtatcctataacctcaacgccttcttccatagctaatttcatttgctttatatgtgctctcaaataatctattctataatcgtcctctacagttttattttcattcaattcttctctaacaccaatcccattttcagttacaaagattggcattttatatcttgcatatatctcttttaaagctattctaaaacctataggatcaatagcccatccccattcatttttctttaatagtggatttggtgtcattccttttactatactctccgtatattccggatcatcttttacagttgaactttgataataactaaatgtcaaatagtccactgtattttcttttaataactcttcatctccgtcttcgaatattggctttatgtctctacttttccacctacttgtcacatatgttggatattcaccattagcaaatacatcaaaatagagatcattaaagagctcttttacttttaagtttgctaatgcatcctcaggtttacacgtcattggatatgttgtcatataagtaaccattccgcccatttttccatctggaattatttcatgcatcagtttagttgctttagcatgagctataaacacattgtgacatacttgatacgctaaagcttctttattaacattattacttacttttactccccacaactccatacgcggaataactaaattttgctcattgaatgttatccagtattttactttatttttgaatctttcaaatactactcctacatatttctcaaataaatctacaacttttcttgatgcaaatccattatattttttcgctaacgcctctggtaaatcaaaatggtaaagtgttataattggctctattccattagctaataattcatcaaataaattattataaaaacttatcccttcttcgttaacttcaccttctccatctggaataattcttgtccatgagatacttgtacgataactatttattcctagctccttaaacaatgctatatcttctttatatctatgatagaaatcaacggctacttcccaattagaaaaaccttcttttatttctcttttatctactatagaaattccttttcccccttcattccacgctccctcactttgaaatgatgtaactgcacttccccaaaagaaattatcaggaattatgtttatattttttttattcataaattacactctcctcttatctttatacaaagcatttaaggctttaatcacattttatatttattaaatctaactttcatcacctgtctatacaacaatttttttgattatgctataatatatttaaataatttttatctattacgaggtgagtaaatttgaaaagtgattatattattaacgacttgattgaaaaaattacttctagaaagctcttagtatcatctcgtattccatctgaaactcagctagcaatcaaatatcaatgtaataggcatactataagaaaagcaatagctcatttaattgaaaggtcatatttgattaaatcaattgatggctcaacttatgttaatgatgttaatcattataataacagcattctttttttatcctctctttctgattactacaattcggataatataaaatcaaatgttaatgaatttaaacttattgattcatctgaggaacttagcaaattgctgcaagtagaagtaaattctcatgtttggcttataaaaagagttcggtatatagaatcacgccctattcatacagaagagatttacatgccatattacctatttccaaaccttacaataaaagattgtgagtctagtttactttcatatattgaatcccaatatgattataaaattagtcacggcatcagaactgtcagccctatcaagctaagtgaatatgagagtaatttattagctttacctaatgagtctgttgtaatgcagattgaaaatataggttatttgactaatagtagaatatatgaatattctataagtaaatctagagaaagtaagtttcaatattattgtaggcgataaaactaatattgtataaatccgtattattaaaaaatttagaataaaaatgtccttcaaatacttaatcccaaagttaagcatttaaaggatatctttattttatttactatatatgttctaaaaatctaatttactaatatttatcttagactatcagataccatctcaaataattttgtaaagaatgaattatattatttagaaattatatttttttcattttaatctatttcttactgcattttttacattggcttttttgattattatttcgctttgattcgttgtcatctgcaacttcttctgaaaattctgtcatcagttttgaacggttcattttattgctaactcttgcatagctatttttattcttttcagtgttcctaaaatatttcattatcatataaattgatgaaaatagagctatcattatcaatcctactataagtcctggtgcttgatcagatataagaggcatactaaaaataacaacaatcatacttattagtccaatccaagatgtatacggaaatccaggcatttgacatttcccatctggaggacatccatttcttttacggaatcttatatgcgttgccataattactgcgtaagtaaaaagtagcgaaaatccacttgccgttactagaaacagatatattctaggaaatagtaatccaaatcctaatcctaaaagcattgaaattccggaaaatactatagccttgtaaggaatatcacctttatccttcaaaaacttaggagcatcaccttcatctgcaagtgatcttagcattcttgcaatcccaaacatagaagcgagagatgcagaaagtatagctgtaataagtactaaattaattacatttccagcccatgtaattcccaatctatcaagagccgcaaccattggacttatattttcgcttaaatctgctgtaggaattaaaggaagtaatgctataagagaaattatgtagagtgatataagacttacaactgtataattaattgcttttggtattgtttttcttggatcatcagcttctgaggctgctaatcctattatttcaaaaccagcataagcaaatactactataagcattcctcctgcaatacctcctatgccacttgacataaaaggctctctcataagctctcctgctcctaccgctgttcttcccggaattattccagtaacaagtagaaaagatataattataaatgaaattattgcaaaaagttttatagctgaaagaccactggtgagcttacttaatttatcagcccctaaaagattaagcaaagttacaccaacaataattatagttcctcctatagctattgatatattcggaatccattcattcaataaaattgatacagcagtagcctcactagacattgaaagcaccataccaatccagtaaacccagccaacaacaaatcctgttccaggcccaaaagcttctgatgcaaaagtcctaaaagatcctgaatgtggatttgcaacagtcatttcagataaagcataaagtataaagtatactaaaattcctcccaatatataggatatcaaaacagatggtcctgcagcattaatagccaccgctgagccaagaaaaaacgatcctcctattatgcttcccaaagccatcattgtgagctgccaagcagataatcctttgttttttttcttcataaatattctcctccgtactaaaacacctaagaaagcaaataaaagtatttgcaaatttcttaacgatgtactaaataacttctagaatattattcctcaaaattcatataacatgtactttatctaaatataaaattttatatctattattttatttaaaataagttttaaatatgtaaattaaatctatctaaaaataaaagataaaagttaatgctggtaactagcactaacttttatctcatccaaaattaaatgtaaaacttaattatttaattctaattattttcttctatttttcctactataaatatatatgataatgctcctattaaagctaaaatacctatcaaagctattgctggagtaaaattacctcctgatacaataatacctatcacgattggaattactattgatgataatgctccagtgcagttaaataccccacctgctaatccaactaaatttttaggtgccaataatgatacaaatatccaagtaatagttgctagcccattgccgaaaaatgctatagccatgaacattactattaatggagtgctatcaacaaaatttgctccaattatagttgttgttaataataatccaataattattggggttttccttgctactcccatagagactcccttttttataagtttatctgatacaaaacctgaaactaaaactccacaaaatgcagccaaatatggtactgatgacacaaaacctgattttataaaacttaaatgtctatattctacaagatatgttggaaaccaggttaagaaaaaccaaaatgttgatgatatagtgaattgaccaatatatattcctataagcttacggttagaaaacatcatctttaaatcactaaatttgaattgagatttttccttagcagtcgaattatctacatcctcatcttctactatacctccaccttctttgatataatttagctcagcattatttatacgtttacttttacttggatctctgtataatgcataccaaacaattgaccatgctatccctacaagtcctgtaagtataaataagaatttccaaccaagcttatcctctaatataaatagtaatggacttacaaatgccaatccaacaaattgagctgaagagtatattgcaatagcagatgctctttcatttgtaggaaaccaacttgatgccactttattgcttgctggcataactggtgcttcaaaacatcctatagataaacgtaaacctaaaagtgatccaaatccacctacaatactttgtaacaatgtagctaatgaccatataaataaactacatgcatatacaacacgaggcttaaatctatcaactaagtatccgctaggtatttgcaatgcagcatatacccatccaaacgctgaaaatattaatcccatttgaacagttgataatttcaagtctttcgacatatgagatgccgctacagatatatttgaacgatccatataatttattactatatttataaatattagagctaatactaagtatcttactctagttggcttctcttcagttaaattagtcttataattattatttatattcatactctttattccttcctatctttaaataaattattctctatttagacgaattaaagaaaatagcagttccaaaatattattattatttttaatcctaatacatagtagcttgctcttacctctggccttgtgataattttctgaaacagtatagtggaaaataagcttgtaagattgacttgctattttctaattgcgccttcttaaagcatatcttagtatactcttacctcaattatctcagctttcctgcatccatttgttgattcaatggtaactctaattttatttgctaaaatcttacctatatttttaaatatttcttttcgcttacgattatttttcttagatgcaataacttcccatttgttatccttccatatggaaaccttataatcttttactaattcaggcattacagaaaaatcagtgtaatgatgatgaagatttataagatcttcgtttacatcatcgttaaatgtaatatgaatttcgttaatttcaatatcattttcccattcaagttgtatccactcatctgtatctttaatatcttctgatatccacatatgaggacccccataaggtcttgagtaaccatctataattttactaggagaatatgcatttgtttcaccatgaattctaaagcaaaattcttttctagccatttctttcatagaccactcaacaattggatttataccaatataatcatcaagatttgtattttctatagcctttttagtaaatgaaagtacacctgttaattgttcataagataaatgtattgtaactttatcattagcctttacaaccaaaaatagatttcttgccacttctgattctaatacaaagtcgctcttaacccattgatttcttcctttttccacttgtacttttttcttcttcaaaagatttttaggaatatagttttctgctctgcctgtatcccaaagttctacttccaatgtagtctgttctaagctagaaattagtatttctacatcttcaactctgttttctattggaaataaaattcctatatctgtagtcaacctatattcatcgttagaatttacgacttcaattttctttaataatgtagatgccataatagctgctgatctagccttatctttcatgtcctcattttttattcctataatagatccatcttgtcttaataaaatctgctgtaatttctttatatgcttcatatataaatccctaggaataattttgtcttctacacacattgctgccgctaatccaacagcttctcctattgtagcgcaagttgccataactctagttgctccaaaagctatatgtgatgcgctaatatttcttccagcaaacatcaaattcgatacgtttacagaatatgtggaacgaaacggtatatgaaatactccatcagcttgtatatttctcgagccacagctttcctcatatattcctttctcaggatgaagatctattgaccaaccaccaaaagctattctatcatcaaattcggtctgttcaataatatcattttgatttaaaacgtaatctcctataaacctcctatattctcttttacctggaattgacccaacccactctaatgttagattgtctgcatcataatttcccgaattttttatataatcccatattccatatactagtgtccataactcatctcttattatttcattgtcttttactatatcaacttctccgcctagttctatccaccaatagcagcaacctgagtcattggattttataactctattctttggaatactggttttacttatatcttttgcaaaattaggtggaataaatttaactggatgtccagcatctttagtataaaataatatagtacttcctaataaaattttatcttctttttctggcgccaataattcattatattcatatcttgattctctccctaaattatatttagcaccagctaatgctccaataaatccatctccggaacaatctagatatacctcactttcaaattttgtcttagtttctgatccaattgtccaccctgtcacagattttattttattttctttttctccttcaattacatcgatttctgacacttctgtatttaaaaataaagaaatatttttttcatcttttaccttttctaatagtagcatgtcccaaaaatagggatttccatctggattgcgatactgattttctaaaaacaattctcccataattccagtttctctggcatatctgtttactccatgttttgttgctccacatacccatacacgaatttcactactagaatttccgcctaaaattccgcgattttgtactaaagaaacacttttaccatttctagcagcagaaatagctgcacacacacctgctaaaccaccacctattacggttatatccttttttacatttttgtaattcataattcgctccctttatagatatattaatcctaaatgtctacatctatttagtgttttaatatttacaatgcattgtattattttttcataatcagctttataggaagactatagcttatcccacctcttactgattatatctttataatatattagggtgctgattttttgaattcactaacgtatcatctgcatatactttatttcatatatttgatataacaattattatttacacaaaatataaacatctaaaaaaggaatatttgtaattcacatactctgcaatcaaaatttctatataaatacagatataattactttaattattttttaaatgtttacatttcacttctattttcttataattcttctatggcataatcttcttagctcttaaaggaggcttattgatgtttgatttaaataatcttaatgtaaatattaatcaacatattttttgggataaaaaagaacattttctattggatgaagacatagattcgaactgggtactttacgctattgaagatggtgaatgcagttacgaagttgaatctcataaaggaaaaggtaaatttggtgatattgtaatttgcccacctggaatgattttcaaaagagaggtcattaccactctcacatttcacttcataaacttttcgataaattctggagatgatacttcatcttttccagttggtaaaatatctgtatcagatttaaaaagactcaataatatgtactactatttaaaactatacagccataataacaatattgaattaaaccaatggaaaagctcattgataagcgatattctgaaattatattatatagaaacacagtatagcagctccccaaaaaactttgttcaggatgaaattataaactattcattaaagtacttaaataaatatgcttatgaatccattaaaatcaaagatttttcagcttcactgggacttagttctgttcagtttactagacgatttcacaagtgtataggaaccactcctattgaatatataacttctttaagattaagaagagctcaagtattattactcagaaccgaagatacattagattgtattgcttccaaatgtgggtatgataacggattttatcttagcagggtctttgctaagaacttagggatatcgccttctgattacagaaaaaaataccggtaataaattcatataaaataagaatctaatatatttatatgtgggttgcacaatataaatatattagattcttaaaaacttgctgttaatcagccagcacaaaataaactatttagagcatttactttctcaaatataaagtaaatagcaacaaatcatagagcctagctatctacttttctatataattaatcacattttttactattaaattaatagttccatcgccgtttctttgtatctcaaacttgctagggtcgtggtatgtctcttcatttatatacaaatcaatttgtttatcaatattaagtctaactctttttagttttttctcaacccaagttttatccacagctacttcttcttgcaatccttgttgttttatataagttgaaaactcttccttcgcttgagggtgatcattaaataattcagcagaaaactcctctatattaatagagtcttcttcttttaatttagtttttattgcagtcctaatctcttctgctcttcctgcatcatttgtaacattttctctagtccagttttccgctgcttttacaaaagttttggtcatatctctttcatttgtaacaatgcttgcacctaagaatgtgtttataaaataatttgctccatactcatcttccttactacctttttgcttatctaaaatcattaagttatatttatcctcttctataattggtttaataaatgcagctttttgaattctttgcccacttcctggaagtcctgctgcttgaggtactatccctatacctattttctgatctataaattgaacttcatgagtaaaatttttaacataatccatcttaagtattcctatcattggaccttgatctgtagttagagacactattattaaatctccagatgggatattcacatttcctttcattattatgaatagctgcctagctaattctttagatagtttaactaaattattgtctactccagtcagataatcctgggatacttctttaactatgtttctttctggattaaactttccatatttaagttcttcatccttaaaacacttttctaaatgtttatgtaagaaaaaatatatatcttcatttaattccaaactatactcgtttaaaataggttcttccccattactatctaatatatgaataactgcttcatttatattaatctcatttatgtattccatattttcaccaccaaataaatttatacattagatattataaactttaagtaaattaaaaaaaagccttaaagcatacaaaaaaaatggaaaagagtctgatataaaacttaatttcttatatcatcaatctcttttccacatttttaaatattcttaatttattaatcagataattttcctaatctaattattgatcttcaaatttacttacataattttttaaattcatctgctacaaattgcacctgtgttcctacaacaacttgtacgcttgtttttcctggtcttattattccagatacacctgctgatttaataactttttcatctacagcagcttgatctttaatttctaaacgtaatctagttacacaattatctatagatactacgttttcttttcctccaacaccctttaatattacagctgccacttgagtataatcattattcgcaagttttacatttagttcttcagcatcatcatcttccctaccaggtgtctttaaattaaattttgtaattgcaaaacggaatgttacataatagattactgcaaatactaaacctattgggattaacattattggattttctgccataggagctttgaaacttaagaaccaatctacaaatccagcactaaagttaaatccagctcttactggtaataatgtacatacaaatgctgaaattcctgttaatccagcatgaagaacatataaacctggagctaagaacataaatgcaaattctaatggttctgtaacacctgtgaagaatgaagatattgctgctgctaataataaaccatataccgctttcttcttcttatctttagctgtatggtacatagctaatgctcctgctggtaatccaaacatcattactgggaagaatccagtcatatacataccagttactccttgtgttcctttacctgaccagaagttaccaaggtcgttaattccagctacatcaaaccagaatactgagtttaatgcatggtgaagaccaaatggtattaataatctattgaagaatgcataaataccagatccaactgcacctgttgatacaatagcttcaccaaatgctactaatgcaccataaataagaggccatgcaaagaataatactatagatgcaactattgaatatgctgcggttacaattgcgacacatctttttccactaaagaatcccaatgcatctggtaatttaacacttttaaatctgttataacaggctgcacctattaaacctgataaaataccaataaattgtgtttgagttttagcgaatgctggcgctacctctttaacatcaattcccttaaacattgctacagctcctgtagataataatgttgtaatcataagccatgaaacaagtcctgcaagtcctgctgtaccgtcattatcatctgacattcctacacctacaccaattgcaaacaaaattcccatattgtcaattaaagcactacctgcttttagcataaaagctgaagcaatgttatttgctccccagcctgtagggtcaagccaataaccaagacccattaaaatacttgcaacgggtaaacaagctactggaagcattaaggattttcctaatttttgtaaatacttcatcataataatataattccccttccataataattaataaaatttattttaaggattgttatatccctaaatgcattataattcttatggacatgtatccttttcagcaaataaaaaagctgaaaaggataaattatattatccctttcagctaatgccctgatttaatcggttacacgccaaagatcgtattcttatacactcatattattctatttttattctatagtcaatacccttttttatttttttattgttgacactaattgtatgaaataatataattagtacataaatgtgttactgtttaatcaggcataagtttgcgtaattcggaaacttatgcttttttattaccaataaataacagaatgaaaggaagtgactgttcctgtttaatcgggaatattaagtatgtttaatttttttaagaaaaattcaaaggactcaaataaagaagcaaaattagttgcacctataactggtaaaacaatagatttatcaaaagtaccagataaagtttttgcagaaaaaatggctggagacgggcttgcaatagatactactggagatacagtagtttcacctgctgacggaaccttaacattagtatttaatacaaagcatgcatttgcaattactcttgataatggagctgagttattagttcatataggtatcgatactgtttctttaaatggtgaaggttttgaacaattagctaaagctggaactaaagttaaagctggtactccaattataaaaatagatagggattttattttaggaaaaggtttttctttggtcactccagtccttgttacaaacatggatataatcaaggatttaaattcaaatattgataaagaagttgttgctggagaagatgaagtaattacttttactttataaaaaaaaaatggctaacatgtttttattaatatgttagccattttaattagagttttattgtagcttttctaaatctctctatatgcattgctagatatgctatttcatcatctgaaactttcttttctagctttaaaactaatatttttgctacacccttagatactttatatgataatttatattttgattttatttcttttataaagtcattttcaatagatatgtcatctaaaattcttttaattgcaaatctcaaatgtgtgagaaatctggcataatctaatgatgttttgtctatttttatttcagtttttgcttctacgtattcaattattgagtttatcaaatgtgtattctttatagtattggatagcttacctgaatttctagcagaatggatatgtaatgctatgaatccaatttctccttctggaatttttacctttttttcattttgtaaaacttccgcaactttttctgctaacgagtattcttgtggatataatgctctaatttccataagaaatggattctctatttcctctttgtccgaaagccttttcactgcaaaatttaaatgatctactaatgcaacgtgtattctctcatccaaattttcctttaattcatttgcaacatatgatatcatcttttcgcatagcacaaaaaattcttcatcaacattttcgattacttgtttaaagtttcttaggttatcctcatcttcaataacaaatatcttttcaacctcagtacccttttcaatggtatctccagactttctaccgaatccaattccctttgcaaaaagtattctttcctttccattcatgtttacggaaactatattgttgttataggattttattatcgttgctggatcaataattttactcatatgaccaccctttttattatttatagaactttctaatctttagcaaatcacttatcatctgaattaatacattatttagaaaatataaatgacattattaatcttataaaacgattctatcattaaccttattatttaaatactttacttatttttagccgttagtatctattatgattcttttaaaccatataaatctaatatattaataatagcttaatatattatttattgtaaagcacagatttaagaaatcttaagatataaatagaaagcagattcctaagaatctgctacatttcataactcactaatataataaatggactaatataaatatattaattaaaattccatttattactcaatatttaatatagagtattaagaatattctactaagaaacattataaataactatgctaaaatcctttattaaaattcctcttttacattttcttttcttaattcttgccttccagcaacatatacaaatggaagatatattaatatacttacaattaaacaaataagagctgtaactccacccatgattgagttcgtagatatgattgctcccaaaattggcggtgtcgtccatgttgccattattgctacctttggaacaaacccaataactgttaatatatatgctatggttaatgaaactataggagataatataaacggaataaaatagatcggatttaaaactattggtgcaccatatattactggttcatttatattaaatattcctggtgctatacctaaatttgcaatggccctttgttgtgcacctgcttttctacctaatacatatattgcaatcaataaagctattgaggttcctgctcctcccatatttacatatgaatctaaaaattgactatttaatatattttctggctgtaatccatttgttattgcttctgtattagctaaaagtaatggaagtaataatgcatttattactggtgctagtatatttgaaccatgtaaaccaaaaaaccataatacatgtaccaataatactattacaaatactcctaaaaagcttcctgcaattaattgtaatggtttctgtagagtaaagaataatgcctgatgtatatctggtacactcataactataaataattccttaattcccgctgctaatgccaaaattattattgttggtaacaatgctgcaaatgatttcgaaactgctggtggtactccactaggcatttttattactaatttaggattgccgattaactttacgaaaatctctgtagatactaatgatactatcaatgaaataaataaaccttgtgcccctaaaaaagttaatggaaatgctcctccatctggtgtcgttgcatataggatcatcgatgccgcaactgatactattccagctcctaagccatccttatcatacgatcttgctaaatgatatgatatcgtaaatacaactaatattgacataattgcataagaaccattccatatagatcctccccagcttttccaacctgctggcaatagccaatccatgaaattttgataccattgaaatcctatattattgaacaatactgcaaatgcaccggccattataataggtgttattgtagcaaatccgtcacgtatagctactaaatgtctttgcgaaccaatcttaaatgcaattggaacaaagtgctcctccatccattcaaaaaatttattcataattatttcctccccatatctaagatttatttgaaataaagtcaaaactcatccatggctctatatagtctagtataatatttacctaaacattactttctctcttcgctttattaatataataagcaccaattgtaggtgaaatttcatcatctactatatactcaataactatattttctcttaggtacttttcaaaagatttccttaatatctttgcttttcttataaccccaccaaccaaggcaatagagcagctttcaaattttaattttctatacacatttataacagtcttagccaaatctacgccttcattaaccaatatttcttcagctatcttatttccttcctcgcccaatattgaaactacttctgccaaagatgctatctcgtccttagtagaggaatatacaaaagttactacttcgcctattgatttagcacctaaccttttcataattctcgtagttaattctgatttgggtaaagaattttcttcttcaaatatcattctttttatagcatcaattgatattttatatccactcccttcatctcctaataagttgccccatcccccacaccttacacttgaattatttttaactccaaatgctatcgatccagttcctgctattgtcaatattccatcattcccccttaacatagcttttagggctatttcagcatcgttcataagtacacagtcagtcttaagttcattttttattgtatcttttataatttttgcattatctccgacttccgatcctgcaatgccaagatataaatctacaagttcgtcttctttaagaacatctattatttctcttattgaatctactatattatttagtgctttttctctattatttagcaaatttgcgaatccttttacagaagtaactataatatttccttgaaagtcataagctactgcttccgtttttgttcctccaccatccacacctataatgtatttcatatcatcactaccttttccttaacattaagtaaataagtaattaggctaacatatgttgttattaaatttttcatgtatttctataatttcaactgccatagactttaatgtcatactagtcataaagtgatcctgagcatgaatcataagtaaagaaacttctgttttttctcctcgtgcttccttttgtattaaatatgtttgaacattatgtgcttttaataattctgcttctgcttgttcaattaattttcttgctccatctatattcccacttttagcgcattgaatagcttccattgaataacttctaacttctccgctatgcactataagattcattattgtttcttccacaatgtttctctccttttcaattatttattttttataagatctagagctctttctaagactttttctccattcattgttccataatcaactgtattaattacttctacagatatattcttatccgataaattagctttaaattttgataataaaaatctaacctgaggccccagtaacaaaacatctatcttacctatatattctttaacatctgcctctcctacagcttttatattacattcaatccctttttcttcagctgccttttccattttcgaaactaataaacttgtggacattccggctgaacaaactaataatatattcttcatttttaacctctccttggatattttttttactagcattcatctattacactattatataaagcaagttttataccaatattatatttatacataaataaatataaatcatctcataatcgcacaattcatgaatcgaagtgtgcaactttaaaaaaatagtgtgtaatttaacttacacactgctttggctcttacacagtaactatattttccttaacaattctcactatataagcgatctcattatctcctatatttatattatatacacgctccaagtcttttaaaattttcttaatcaatgaaaattcactattatacatatggcgataattttctaaatctttgaattttaattcttgaccaccatgctttaatttatctataagaaaagtgatatgaattaaaattcctatctgtgcatcatgctgaattctcacttttaaattttcttctatttttcttattacatctctaatatctgaaaatacctttattgaatttaattcatttaattcaatacttaatgcttttctaacttttagaaagtcatattcaatgtccactagattctccaaatagtttattccctcattcaagaatacatcttgtgctggtataaattgaacattttcaataactatgtttatagttcctacaactgctaatactacaaacttctcttttagcctatttacttttctaaaaaactcttccctatcagaaatattaagcggtataatttttactttttctatattcttcaaattattacttattcttatttttattctttctgctgcaccttcacctgtaaagcatgtagttattataactagttctttattgtatttatagtcttccttagaaacttgcatagaggactttccaatatctctgcataaattatatattgaatccaaacttctcccattaaaagctttacttcctgcctctataacagttagtgttgtgaccatatctatggttttaatttttatttctaattcattactaattatatctccaaagttaaccaatgatcccatatcaacaagtaacaatatacctttttcattatatatttctttaatttttttcttagctttctctagcatatcctcagccttcatagttagtggcatatctagagcttgcacatattcttctcctattaaagaattagctacctcagccatgctgctagctgtacttgttccatgcatcattactagaactcgcgcctttttctctaattgttcactattttcatcattacatgcagccaaaaacatagttatatagcctatttcatctaatgggatatctatatgaaattctttttccgcaatttttataatatccatggccacagcaaattcttccctattttctacccttataatattaagcttaggatgatatatcttttttcctgaattaatcctttcgatgcttccctgtaaatgaagtgctaacccaaaataaactttctgatcaaaatccctatttaacttttcagatgctatactcaacattttttctgcaactgtagctactttaatgtttacaattttggcaatctcatcttttttaacatttgttgtgatattactaatatatcttctaaaatatttttccaaatcaatatttagaatatcatttatttctgtctcattaattcctcgtgcctttaagttttccatcttattttctattatcgaataaaaacttttattttccgagccttctatttgattttcatgaaattcaatattttttagtatactatcttcacttgaaaatcttaaaatatcagccatatcttgagataaattatctatttcttttctgcattctctaattctcattattcctttttgaattctaggttgcagatcacttttatctaccaaaatataattatttttcttaatcttataatttaaaaatgctttagcacaagctaattgtatatcactttttaattgccctatattattaggacagtcatatagtaaaaatgaaataatcgcatttttactaatatatatgctctttccgattcttatagattcttctgttatgaactcgtttaaaagaagatatctttcctctaattttctttctcttaatgtcggtaatactatcaccattggaattcttctagtaaatgttttcagaagatatgactgtggattctccgtagtagctgctataatctgcacttcagatttcacctttttctcagtatctccaagctgcctaaaatatcccttatctataaaagtaaataacatttcttgcccctgtggtgatagcctgtgtacttcatccaaaaagaatattcctccatcagctttctttaacaaaccttctctatcagtatctgcccccgtaaatgcacctttttttactccaaatatttgtgccacaactaactgaggattatctgaataatcggcacaattaaatctaataaaaggagcttcagcagctattattttagagtctttagcaaaattgtacattgcttctgcaaatagcgattttcctacaccagtttcacccaaaataagagcatgtaagcctctaggaggatataatattgcagctttcgcttgctgtacaggtaatttaagtgactgatttgaacctatgagcatttcaaggctatctatatttttcacgattatgtccgatttatttttaattgaattcatttcattcttgtaacttttgatactactatatataactggtcgtccttcttttttatttatccttttttccttatataattggtttaaatacctacttatatttgttcggtctattcctatataaaatcccagttcatctgctgttattcctcttcctttgatcttttcaagctcaataagactctttattacttcttcctttctaggtaatcctttcatttaatattatcccccactcataagtagtccacattaaaaacataaaatttgtccttataacttttaacctactatataaatgcacctctatatattgtcccatgtttttcgctttctaagatacatttgaaattttcctttgaattcttctacataaatctttgtgaaaatataactggatactaccagttttgaattcattatataataatatttttatttcttgcaaccatattcttcatattattataattgtttagataattctgactctactataaatatgccatataaatcaattttactagcacaacttttaaaattgctatattatattattatataaaaataaatatctactctttttaagtattatttattaactttaactaaggaggctattctatgcaagagttagaaaccaggatcgttgatattgatgttgaaaatataaggaaaattttattatcaaatggtgctgaaaaagttaaaatggaagatcaagtaaatgatatatatgattttgaagatggacgtcttttagataagaaaggatatgctagaataagaactataaatgatatgattaataataaaatcgtgtattttatgactaccaaaaaaatgctatcccagggcagatttaaagtcatggaagaaaatgaagttataattgataacaaaactatgggagaaggtatatttaaatctcttggattagttctgaaagaatctaataaaaaatatagagaaagctataaattacttgattgcttaattgaaattgatattaatgacaagagtttttgtcccttcccatatttagaaattgaaactacatcggaagaaaaattggaaacagtagtgaagttacttggatatacattagaagatacaacctctcaaacaatatacgatatattatctgaaagaggattgcttaataatgtccctaaaggaatataattaagtttttattccattaactgtaaatttactatggaattataagtttatataatgtaaaatatacatagagataggtatacttttaaaatgaaatttgtttagtttacttttaaactaaactttttttcttataaaaggaggatgtcatggaaaaatatgatgacataaaatatttaagtctgcttgctaagcaatatcctactattgcagcggcatcaactgaaataattaatttagaagctattttaaatttacctaaaggtacagaacattttttagctgaccttcatggtgagtatgagccttttgttcatgtattaaaaaatggttcaggggctataaagagaaaaattcaagaggtatttgaaaattctttaatggactgtgaaaaaagaagtttaaccacacttgtatactatcctgaacaaaaattagagattgttctaagagaagaaaaagatataaatgattggtataaaattaatctgtataggttgattgaattatgcagacatgtatcttctaaatatacaagatctaaagtaagaaaagcgctacctccagattttagctacattatagaagaattattacatgaagaatctgataataatgataaacagggttattatgatgggataataaatactattatcgaaattgaacgagcccaagagttcatagtggctctatctaaattaatacaacgactagtaatagatagattacacataatcggagatatatttgatagaggtcctagaccagatataatcctcgatacccttataaattatcattctgttgatatacaatggggtaaccatgatatattgtggatgggtgctgcctcaggtaatactacatgtatagcaaatgttttaagaatagcagctagatattctaatctagacgtcatcgaagatatttacggtataaatttattacctcttgcaacttttgcacttaagcactataaaaatgataattgcatagctttcgttcctaaaaacacagatgaaacattatatggagcctctgaaattgagcttatttctaaaatgcataaagccataacaattattcaatttaaacttgaatatgaaattataaaaagaagacctgaatttaatatggatcatagattacttttagataagataaattatagtgatggcaccataactttaaacaatataacttatgagctttgcgacaaaagtttccctacaatcaatattaataatccttttgaacttacgagtgatgaaaaaaaattggtttctaagcttcaaatttcatttataaatagcgataaattgcaaaagcacgttctatttttatttaataaaggaagactatatttaacttataattctaatcttttatttcacggctgtattcctttaaataaagataaaacttttaaaagtatgactattcatggtgaagagtataaaggaaaaaaacttctagataaatttgattctttagctagagaaggttatttcagtactagaggcagtgctgaaaaattatatggtattgatataatgtggtatttatggactggagcctgttcttctctttttggaaaagaagatatgacaacttttgaaagatactttataaaagacaaaagtacacataaagaaaagaaaaatccctactacaattttagggattctgaagaaatgtgtaatatgatttttgaagaatttggattagatccagctgaatcacgaataataaatggacatgttccagttaaaaataaatttggagaaaacccaataaagtgtaatggaaaactgatagttatagatggtggctttgctaaagcttatagaagtcaaactggcctcgcaggatacacattgacttataattcctatggacttcagctaatatctcatcaacctttcaaatcaattgaagatgcatttagtaaagaaacggatatattatcttcaacacaaatagtagaaaaactagacagaaaaaaagttggtgatacagacataggaaaggagcttaaaaatcaaattaaagatttgaaattattgctcaaagcctatagaaaaggattaataaacgaggtaagatagcagccattatcttacctaaaatctaaatatgtagaagaaatttatttcctactagtctctaactaaaattagatcaataagttatattcaaaatcttcattaaagaccacttgattataacctattgatctgattattttttattgcacttttacttcactttatttaatgctaattattcagcgcgccttatttcttcaaattgagctattaattcttgtactgctttagtaagattaccgactattgcatggcaacgattttcattatttaggtataattgttttcgtcaatagcctgtatcctatctaaatatatttccgcttataatgagtttttgtatctcatttgtgccttcatatatttgagttatcttagcatccctcatcattctctcaacattatattctctcatataaccatttccacctaacatttgcacagcctcagttgttacgtgcattgctgcatctgtacaagctagttttgctttagctgcagaaactgagtaaggctttccttcttgtttatccatggcagccttatataccatgtatttagcttgctctatttcaagctctaactctgccattttgaaagctaaatattgatttttccataaaggttttccaaattgctctctttccttcatatattgcttagctacttcaaacgctccttctgctattccaagtccttgagctgcaactcctattcttcctccatcaagagtcttcattgctattccaaaacctttgccctcagctcctactaagttttcaactggaaccttacaattttcaaatacaagttctgaaacttgtgctgatcttataccacatttattctcaatctttcctatagagaatccttcgaattccttttcaactataaaagctgataatccttttgctcctttgctcttatcagttaatgcaaatactaagaatgtttctgataaaggtccatttgtgataaagcattttgcaccatttaatatataatactcaccattcttatcagctgttgttatacatccacctgcatctgatcctgcatttggttcagttaatccaaatgatccgaatttttttcctgacaaaatgtctggaagatatcttttcttttgttcttcagatgctgcattaattattcctcctgaacaaagagaagtacttactgaatatgaaattcctaatgaaccactcacttttgatatttcttcaactgctaaaacataagataaataatctccaccagttccaccatattcctttggatatggaagccctatcaatcctaattcccccattttcttataagtgtctattggaaattctccactttcgtcatatgcaactactttaggtttaatttcgttttctgcaaattcccttaccattttcactattttttcttgttgctctgttaaattaaaatccatcttttaaatcccccttgtaatgtatatctttttaatttaaatataatttgaattttcaataggtaccctatcttaacgcttagagcccttaattttatataaaatatatttactcccttaatcccatcaacttatcataaaatattcttccattcattagtctaggtactccatccattttaggtttgaaatccattaaatccaatacatccttttttagatctatcccaggcgctatttctgtaaggtataatccatctttccttaactcaaatactgctctctcagttatatacataacttgttgatccatccttcttgcataatctccactaaatgtaatttgctctacatccttaatgaattttttagcttttccttcttgtttaatttctaatttgccatctcctgttactacttttaagcctcctgcagtgaatgttccacaaaataacactttcttagcattttgagttatatttatgaatccaccacatccagcaattctaggcccaaacttacttacattcaaatttccatgttcatcaacctgagctagtcctaaaaatgctatatcgacgcctccaccatcataaaaatcaaattgatatggctgatctataatagcttctggatttatactcgctccaaaagctgtgcatccttgtggtatacctcctattggaccggcttctacagttaatgtcatatattcaccaattccttcttcattcgcaactaaagaaataacttctggtatccctatacctaaatttactaccgtatctttctttaattccatagctgctcttctcgcaattatctttctctcatttaatggagctttttctacactgtttaatggaattctcatttcacctgttactgctggattaaatgggcattcgaaggattgttcatgctcttcgggagttgagattacaaccgcatctacatatatacctggaatttttataagacgtgggtctaaagatcctgcttcaactactttttctacttgaactattacttttccgccattattcttacaagcttgggctattgacgtatcctcaagtgtagctatttctttttctaatgatacattaccgtattcatctgcaaaagatcctcttaagaagcagacattaactggaattgatttgtataataatttttcttcaccttctatatttattagctttactagatcttcttttgttttttcatttaattttccaccactaattcttggatccacaaatgtattcaatccaacgtgagttattgtcccaattctttttcccgcaatatctctaaataattgagaaattgtcccttgtggtagattataagcttctattttattttcattaattaactttccaattttcggtgctaaattataatgacctgcaaccactctcttaagtaagccttcgtgggcataatgatctgaacctttccccttactatcgccttgtcctgctgcatgaaataaagttatattttgcggatgatttgtttcaatgaaacgtttttctaaagcacaactaagagtttcaggtgcacaactaccaacaaatccgccagttactaacacatctccatccttcactatttgtactgcttcgcgacttgttaaaacttttacttttctcacctatattcagtcctttcaagattaattaactgtcctagcgtcttaatcttttaacatcctttaaatagagcctttcttttttctataaatgcactcattccttctgtttgatcatcagttgaaaaacataatccaaataggtttgcttcaaatgcataggctgattcagtatccatatttaagccattatttattgctgatttagccaagcttactgcaaataatccttttttcattattttttgagctaactcaatagttttttccattagttcttctggttcgtaaactttattaacaagaccaattctataagcttcttttgcatctatcatatctgtagtaaatatcagttctttagctattccttttccaactaatcttggtagcctttgagttcccgcaaaacctggaattattcctaatccaacttccggttgtccaaatttagcattggtagaagctaatcttatatcacacgccattgataattcgcatcctccacccaatgcataaccgtttacagcagctataacaacttgtggcatattttcaatattagaaaataccttttgagctagcttagccatctctcttccctctattgcacttttacttttcatttctgttatatctgctccagctacaaaagccttttctcctgatcctgttatgataacagtatatatatcctttctttctgatatatcatttattacttgtcctagttccttgagtgtttgtgtatttaatgcattaagtgacttaggtctatcaatacaaatcactgataccccattttcttcctttaccttaatattttccatttaatattcccccttcaagatatattgtatttatattaatatcttttataattaatattttttgttttcgatataatttatatggtggaattaaatttttaaactttaatcttaattaaactttagcttactagattcttaactataaatttaatatcgcaacatatattcatcactcatcactttatagttaaaggttttcatagaaacagactttaactacgtttgtttattatttcaaatgcatacatcattaattatttttgcactaatgattcccaaagtatattgctacaacctagcttctatattttcttcaacaaaatcatcattcttatattttctaaatgactgctctatttcctccaatgatttaccatatgtctccggtgcacatttatagataaatatacctcctataattgacgatcctataaacactatgaatgctcctgataaaccaaatcttgctaataatatagggaatacaaaacctactataaagttagctacccataaagcaaatgctgatattcccattccaaaacctcttaatcttaatggaaaaatttctgatattaatagccaagttaatggtccaagaaaggcttggaagaaagctatataaacaatagtacacattattacaacaaaaggaagcatagatgaaccttgtaaaacgtttgtaacaacagataacgccgtcatagctatagtcgttccagttattccaagtaaatataactttctacgaggatatttatcaccaacacattttacaaaaaatatagctgctataacagacatcaacccatttcctatgttagcaattaatgccacctttgtaccaaatccagcttgttccaaaattgatgttccataatacatcattatattaattccagcaatttgttgtgtaatacctattccaactccaattaaaacaatgcgacgaatccaaggaatagataaatcagcaaatgatgccttgtctaaatgcttttccgcttcaatattcttatttatttcttctaattccgcttctgcctctgctttatcacgaatctgttttagaacttctaatgcttttgctgtttttccattagatgctaaccatcttggtgtttcaggaagtaccatcattccaaaccacaatacaattgctggaatagtagcaagtactatcatataacgccatacaccagaattatctgcaaaaaggtttcctaatacagcatttataacataagctactaattgtccagtcacaatcatcatttcatttttagatactatgcttcctcttaggtgcataggtgccaattctgctaaaaatgttggcacaataactgatgctcctcctacagctaaccctaaaacgaatctagaaacaatcataatatttgcattaggtgcaattgaacaagttatagttgcaaaaaagaatataatagctaacattcttattatcttttttctaccatatttatcagatagacgtccgccaattattgcaccaaatgctgcacctaatgttaatatacttgtaacaagcccttcattcataggtgtcaaatctaattgatctggtcgtttcatgaaacttaatgctccattaaacacaccagtatcatatccaaatagcaatcccccaaacgttgatatgatttgtattttcctcaaattgctttttttcttaatattataagaaccttgttccattctaattcctccttatctactttaaataattagaatcattcagaattacacaaatacttttataatttattttttcatattaatactgtttttcttaatatatttataaatgctttattctgatttcaatatattagtaacttatacctatcattagtatggtaactagatatattgcacactcttttttaagaaatactagttaccaaacttaatagattttgttcatttgaaatcttttatgaattttaattttaaaatcctgttttttctttgatgtattttctagctttcattgcatattcaaatgggtttgcaattgctggatcctgttctgcttcaactaatatccagccttcataattgttttcatccaatatcttaaatattggctcaaaatctatacatccatctcctggaacagtgaatgaaccctctcttactcccattaaaaaactcattttttctttcttaactttttctaaaacgtctgctcttatatcttttaaatgcacatgcttaattctattagcatatttatttaatattgcaattggattctctcctgaataaaccaaatgacctgtatcaaataataaatatactaagctttcatcagtcatactcattaacttatcaatttcatcagtggtttgtactccagtccccatatgatgatgataaacaattttcattcctttatcttctgctaaccttccaagcttatttagaccgtcagctaataatttccactcttcttcattaaaataatattttccctcacatattggggtatccatttccccttgaatactatgcccttgctctgatactactataacttttgcacccatttcatgtaagaagtccctatgagctataaattctttttcagtttcttcataaggcttagtagttaaaaatgaactaaaccaagcacttgctatttgaagatttcttaagtctaatgctttttttaaaacatttacatctttaggatatttatttcctacttcagtacctttaaatcctgcaagagccatttcacttacagcttgttcaaatgtattttcttttcctaaatcaggcatatcatcatttgtccatcctattggacaaattcctaattttactttttcagtattaagcataacaatctcctccaaaattctaatatactatttctgatatcctaactggtctattctctttcaatgatttagttgcagcatctcctattaacacagcttttaatccgtcatccgcacttactgaaacatctttattgttaacaattgcatctatgaattctgtaatctcatctgcatatgcctgcatatacctttctaagaagaaaaacaatggcttttcagctgcaactccatccttagttgatatcaccgcctttgagatactatcatttcccacagacacttgaccaagagatccaaatacttcagctctttgatcatatccataagctgactgccttgaattatctataactgccattgctccattggccatttttagagttataatagctgtatcaatatcacctgcttctcctattgcattatcaactagaacattaccagctgcataaacttctaccacatcactacctaaaagatatcttgccatatcaaaatcatgaattgtcatatctaaaaatattcctcctgatacctttacataatcaatcgaaggtggttcaggatctcttgaagttattttaagaacatgtggttctccaatcttcccttccacaaccgcatttcttatggctttaaaattatgatcatatcttctattgaaacccacttgatatttaacatttgatttattaagttcatctatcacttctttaattcttgccaaatcatgatcaattggcttttcgcaaaatacatgcttacctgctcttattgcttctatagagatttttgaatgagtatctgtagatgaacatataagaatagcatctatttctggatcttctagtatctttttataatctttatatacgccttgaatcccaatttctcttgcccaatttattgtagcttcatttaaaaatacatctgctatagcttttacctctgcatttttaacatactttgaaatactttctccatgaacttttccaattcttcctgcaccaataattccgacctttaacataaattatctctcctttaatattttcttgcatttttaagttgattttgaccatattcaaaagcttcattaacaaattttttttctgatacttcagctaatcctacatgccaccatgattcatatccatcagtcatggtttttggtaaaactttaatatcaattaaagtagaaattttttgtttttttgcatcactcaatgcaacttttaattcctctaaagtcttagctgtatatgttttcactccgtatccacttgctgccttagcaaaatctataggaattaaacctccattaagttcttctgtgtcgttatttctgtatctaaactctgtagcaagattccctattccattagacatttgtagattattaatacatccaaatccacaattatcaaataataatacatttatcttcttaccttcttgcaatgaagtaataagttctgaatgtaacattaagtaacttccatcaccaactagtgagtagacttctttgctaggttccgcaattttacaccctagacttgcagctatttcatatcccatgcaggagtacccatattccatatgatatgaatttctagaatcagtttcccacattctttgaaggtcccctggcaagcttcctgatgcacccactacaattgcattatcatcaatgcattctctaatcaatcctagagctgatgtctgagtaataactccgctagttaattctttaaattcttccaggcttctttcatttcttgattttataattggagtgaaatcttttccatattttatattaattaacctatccatctcctctctccatgcttgttttgcatttttaatctcatcttcatatgatgaaacataattttctttttctaataaattactaagtttctcaatacaaactttagcatcaccaaccatcttattggaatccaatttacttgcatgaaattttgataaatttattgttataaaatctacttctggatttttaaataaagatttagatgatgtcgtaaaatctgaaaatcttgttcctattcctattactaaatctgcatctttagcaattgtatttgcagccaaatttcctgttactcctattccacctaaattcatatggtgacttcctcttatagcactttttcctgcttgcgtttctcctattggaatattaaacttttctgcaaatctttcaagtacttctccagcttctgaatatctaacaccaccaccacaaattattattggtttctttctcttagttattaattcaacacattctttaaactcttcatccacagctatcggtcttgttattttatgaatacgttttttaaagaaatattctgggaagtcaaaactttcaccttgaacatcttgcggtaatgctatgcacacagctccagtatctgatggatctgtaagaactcgcattgcattaataattgcagacattaattgctctggtctagaaactctatcccaatacttacatactggcttaaatacatcattagttgtaattcccatattataagattgttcgatttgttgaagtacaggatctggctgtctgctagcaaatgaatctcctggaaacataagtaatggaatattattaactgttgcagtagctgctgctgtaaccatattagctgctcctggtcctattgatgttgagcatgctattatctttcttctattattttgtttagcaaaagctgatgcaacatgtgccattccttgttcgtttcttccttgataaacttttaagtttcctggatcttcatcaagtgcttgtccaagtcctaaaactattccatgcccaaatatagtaaagattccatcaataaatcgttcctctttcccatcaaataaaatgtattgattatttaaaaatcttactagtgcttgagctgttgtcattttaatagaattcatctctttacctccctttactcctcaggccatattttagcattcttattccaaagccatttatgttcatctacatctattctatctctccaaggattattttctagatgcctaatcatccaacaataatacattgcatatcctggagcagatgtttgcggatgtacatctcccccaattattgttgcaaagctattatctagaatcttgtatgctttatctccatttaagcacaatccaaatcctcgtggtttatcgaacttataaaagtaaacttctggttggggatggtaatgaggaggatagcttgaccattttcctggatatgttataacttctccaataaccatattggaatacggtgcatttttataatcaaatattgttcttaccactcttctagcggtaccattccaagtcccttctccaaagatttcactcttacattcacttggtgaatataactttggttcaaaaaatcccaaattttcagtgctttgaattaatatctcactatcttcactggcttcaacagtaactccaacattcttaggtacatgtaagcaccatggatcatcatcaaatactgattttctttcaatagacttagaattttcaagccaatttattttcacttgtcctgtcagaagtaaaacagctatttccttatcactttttagatattctcttctttgatttttttctaatttttctaccgttacatccattaacatttctttatttttaccattaatttgacataatatattctcgccattttccaatctatccaaattataaaccatattaactcctcctcttaagctctagctaccatatcaccatattcttctttttcttcttttataaaatttcttattgcttccactgtaggcatatcttgcgagcaactatgactagccactaacattgctgctgatgcacttccaaattctaatgaatctataatgctccatccttctaataaaccatataggaatgctgatgcataagcatctccaccaccaaatgatttaagtagcttaaccggaaatggctttatattgtatgactttccatcactagtgtaagcagtagatccttctttaccatgcttaattactactattttgtttccgtaatctaaccatcttttcgctgtttcttcatctgaatttttctctctagtaattaatttttccattaaatcaaattcttctcgtgagcccattataatatcgctttgttttccagcaatcgaatagtatatagctatttcatcactatttttccaattataagctctataatccacatcaaatattacaactgtattattccttttagctaattccagcgctttcaatgctgcttctcttgatggacttttggcaagagctgtccctgatatcactattgccttagtattttttatatattcctcgtcgatttcatcaacattcaattctaaatccgcaattccctgtctatacattaatatactactctctgttgggcttgctatttcagtaaaagttaatcctaaattttctccattctttgaatactttatttgagatgtatctatcccttcattatcgaaataattaacaacaaattctccaaactgatcctttgatactttgccaatgaatccaatctttttacctaatcttgcaagtccaactgcaatattagctggtgatcctcctaaatattttttaaaagtgctactttcagataaaggcttgttaatatctataggattaaaatcaattgcgactcttcctatgggtactatatccatttttcttgctttatcaaatttaatatattccatttatagttcctccttatgcttatttgaacttccaaatatttctatatgctttttaacattttcgtaggcagccttaatctctgtttcatgtaatttaaaataatcataatcttctaatctcttgtttaattcttttacgcttttcttaactaaattaaatgtagctgttgcaatatttattttttttattcccattgtcgcgcactttttaaaatcctccgctgatattccagatcctccatgcaaaaccaacggtattggtatgttattttgtaaatttttaagtacgtcaaacctcaaattaggctctccactatatactccatgagcgttgcctattgctacagccaaagcatctatttctgtattttcaaaaaactttttagcactttctaacttagtgacttgaatctctatttctttacttccatcttcactgccaccaacatgtccaatttcagcttcaactgatgcattatataatttcgccatgcttgatattttattagttatttttatattttcttcaatctctaaatgtgatccatcgatcattactgatgtaaatcctaaatctaaagccttctttacattctcaattgtagctccatgatcaaaatgtactgctactggcacttttgagttttcagcagcttttaccatcattggaccaataagttctaaaggtgaatattttaatcttacttcagctatttgaagtataattggagattttaattcttctgctgcttttatagctccaataaccatttccatattagcaacgctaaaacttccaactgcataattttcttttaaagcactttttaaaagtcccctcatatctactaatggcatttcatttacctccagagtgctttatatatagaaacaatatcttcatgtgtaatatttttaattgtattgcttggactaccgctttcaattgcatcatcagccattttatctaaattatcgaaaaacttgtcccggtctattccatactcttctaatgaaggtatttgaagctccttacacaaaccgtttacagcatcaacaaattcttttgaagcaatttcatctgatgtttcctcattaacaatttttatatttctggcaagttcagcaaatctagagtaagcaccgtctagtacaaatgtaagacattccttcaacaacattgcattagatattccatgtgccacatgaaataatgcacctattggtctgctcattccatgcactattgttacagatgaattgttaaaagcaattcctccttctaatgccgcaatagacatttgagtacgtgcttcttcatttttaggatctttaaatgctataggtaaatatttaaatattctttttacagcagaaattgcaaatacatcagaaagtggttgagatttttttgatgtatatgcttcaattgcatgtgttaacgcatctattcctgttgctgctgtagtttttgctggagctgtcattgtaaatataggatctattatcgctaacgtcggaagtaatgaacttccctttataagcatctttacatcattttctgtatctgagattatcgtaaattgagttgcttctgatccagttcctgctgtagttggtattgcaaccactttggataattgatttgttatctgttttcccatatagtctgatatcttcccggcattactagtcatcattgcaatggctttcgccgaatctattgggcttcctcctccaatagctataagaaaatcacaattttcttctttaaatatttctacccccttttctaccattaaatcagttggctcaccatttatatcactatatattttgtaataaattttctcttcctctaatatgttagttaacatttttacgtttcctaaactgaccataacgctatcagtaacgattaacgctttcttacctaataactttagatattctttactattgatgagagctttccctcctgttaatattttcttcggcatcatgaactcatttgacattttagtcacctcactaacttttgattaactattgattactttttgattaacttattgttactttatgatttaattataaatatgtttttatcacttgtcaataattacatattgattttgtaacttttttctaaatataaaattaaattctgtaattgctttcacttttaaattctttggtttataatattaaattaataatagtaattctattttgacttataggagtgaattttaatgcgttctaaaagaattgatttaatagaaaaatacatatataagcataaaactatctctattgataaactatgcgaagaatttaagatgtcaaaaaatacaattcgtagagatatagacactttagttgataaagggataataaaaaaggtttatggtggagtaacaataaacaataataataaagaacttttgtccttcgaagaaagaactataaaaaataattttgccaaatcatctatcgccgaaaaagcagcacaatttgttgaagatggtgattctatttttatagattcaggtacaacaacttttaatatgattgaatatttaaaagacaagaaaaacattactgtttttacaaataacttaaatgttatagtccaagcaattccatatgaaaatatcgaaataatttgtctttctggaaaactaactagaaaaacatcttcctttactggcttaactgctcctgatattttatcagcttataacttaaataaatgtttcatggcttgtactggaatttcactcgaaaacggtgtcaccaatacctctccagacgagtataaaataaaaaaagcagcagtatctaaaagttctaaatgttttttattagctgatacctcaaaatttgatgttgtatctttgatgacgttttgtgatataaaagatattgattatatgataaccaatgattgtcctccagaaaagtatgcagactattttcataattataatattgaacttatagtaactaatgaaaaatagagatagcagtttttaatctgctatctctttcatgaatcttcttattatacatttacaaaacccttaccacttatttcatatatatcttctctaactttttctaaaatcatttatagtaatacccaattctaagataatcatcacttatatactttgtaatactaatttgcaaaagtctttccatttaaatttcagaaattatttcaatcaaatcatttactttacaatcggcttctgactgatctatgtagtaatctcttggctctaaagctgcaactgttacccctgctgcttttgctgctcgaattcctaatgccgaatcttctactgctagaacttctgtttccaataattctaatgcttttatagctctaatgtagatctctggatctggtttgctttgcacacactcttcaccactaattacaaaatcaatacaactggcaattccacattcttctaccatccttaaaatttcttttctttctgaagatgatgcaatagctattttgagatttctatcttttaattccctaatcacttctttaactgaaggattcaatatttcttgaaaacaaacttcatgttccttacaatactttgaatattcttcttttaaaatattacgtttttcatcatcatcaggcactaacctttcccatatcatcccgtttgttgatccaatgaaatcttcaatttttcttgtagctggttctatttttaaatcatcaaagaatttcatccttcttttaaaataaaaactttcagtatccactaaaactccatccatatcaaaaattactgcttgtttcaatttctttcctcccaaattaatcgctcaatacaatatcaaaaattaatctaatttctaaatctgatatctttattgtatattccttttcaatttcactgaatgcataccttataatatctatctttcttttttctctttgcacaaattccttaatatcttcctgcatgtcaacatcttcttttcttaaaattctctctaccatacaggatgcatgaagataaagtaagaatcttttattattagacattttaacccctagtttttcttccattttatcaactgcatcttgtacaaaattgagtactttatttacatctaaaattgttagcttctcaattattttctttatagaaaaattaaataccaaatcttttttcaactgctcttcatctatattgaaattgcaccttaatatattaatgaatgaatcaatatcctccccaccaatcaaatgatccaatcctatatatggaattccttcaacttttggatctacagttcctacgatagccagtacatcatacatttgaaatggcaattccttttgtttattttgatacagcttatgataatcgtatgacataattacaaaagaagggtcctcatgctttaagctcttttgtaatatatcctggatttgaattgcacttcccatacctgtatagcaacaagttaaaatagcttttttctttttttcaactggataaactaattgtttattaatttgtacattctttaaaatctgatcattaatttcgataatatttttatcttgtaaaagcatacttccaatttctaataccaatggtgttgagacaaaatcaattaataataacggacctttaatcttcttttccaaacgatttctaagatcaaaaagtgatcccatatcaactaacaagataagtccattttctgtactgttattatcaataaaatctaatattttctcctctatatgatcaattgtagtatcaataggcatatcaatagcttggaaaaagttcttccttaacatcctattagctacattcgccatactacttgctgtagagtagccatgagctaaaacaatacttttaatttcatttttcaggctctgtatattcatgctttttagataaaatgaaataaaaatcaaatcttcatcaagaacctgaaagtctaagcgttcactcaaatgtgtaagcatacgcctggaaagccataaaatattcttcatataactttcaatgaaatttataatttttgggcgaatactattccaatcaggatgattaattaaaatttcttgctcttccttaaaataaagcaaatatgctattgaaagaattttatttccatcctgttcaaatccataattttcttccatatatttaaaagtagattttatattaaatgttaatacagaaaaaaatgattgattgttggttacttctgtattaaatgttaattcatcaagtaataaattcacatttttgaccatctctttagtataatgatcaaacataatttctccggactcaacctgtttaaatccttcaacaaattcaaaatatgtttttttaatgtttttctcttcatcactattaatattcaatagttctgggtgcagataatcataaatcctatcctgatatctacttgatatttgatgatataaactctcctttaattgattttcatttccaatcggtaaatctccaatgcgaactttaataatctcttgatctttcctcttagcatagctgcttccacaactgtattttacaatatttttaattttccctacatttccttcataattactaaaaagcaaaaaggaaattacctgctttgtaaccttaatagtatgtttcaagatttcactttcttttaaaaagaaactatctattaggtgaattttttcttgttgaggtctttctgcaaaacttggaatattaacaataacaggaagtcttctaataaaagtaggtaagaaagtagattggatagattccgtagttgcaaaaattaaccgtacttttgcttccttttttatactattatcaccaatgggagaatactcatttgaatccataaatgtaaaaagcttttcttggccttcttctgttagtctgtgcacttcatcaagaaataaaactccaccatcagcgctttcaagaagcccctttttatctttatctgctcctgtaaatgcaccttttgtataaccaaataataaacttgataacaattctggattatgataatattgagcacaatttaaagaaataaatgaggacttgggatttattaatttttcttccaagcaataatcataaatacattttgccagatatgtttttccagaaccacttgaacctaaaagcattataggaagaccattttctggataaagcactgctgtctttatttgttcaatttgttcttttaagcttccttttgccccaattacattactccatatatctgtttttctaacgtttgaattttctttccataattcatctaaagtattatattcagcctgtgttggggtaaaatataatttagagaaagtttctttatataaaaaaattactggatactctttaatttttataatcctgccttgttttacttctttgttaagataactacttactgtacttctactaagctctactttttcagcaattgaattggccgaaaattcttttatattatctttagaaaattccttggtagcctcttttaaataattagatatatctattgccattctgaatgcccccttagttaataaaagttaaccttattattttataacatacatttagaataaggcatatgaaaaaataataattccaaaatattatgcatacttttaataaaaatgtactactccccatagtagtaggcctcttaagataattacctatataggatagctaaaaatagactaaaatatatttattatttttaaatttgcctaaagcaaagaaatcgaaaaatattcgatttccttacctgagtcatttttttgtatttaggattataagtagaacctgataacatacgtttaacgtaaactttattttaatattctaatttccacatatatcttcttttagttagtggatgctgacgtgcataagaaagttcttcagcatatacacggaatactgctgtaattaacattggattaaaataatcaataactgtttttgggataactgaagataatccataatctaaagcatcaacaactgttgtttttgcttcaaaacgctttaagaatgttaacgcacgggcatccattggacgagtgcttccctcattcattaataaaataaatggtacatctttatctactatttcaaatggtccatggaaaaactctcctgaatggaaacttcctgaattgatccattgcatttccatcattaaacaaattgatgttgaataagcaacttcagcggttgcaccactgctcattaagtaaatcattgaatcatttttataagcttcagcaaatttccttgcatctgctatcgctgattttgccgctgaatctgctaaatcatatatcttgctgaaagcaacctgtgcatcttcataatctttatatccttcatattgctctaatatctccactgcaagttcaagcgcataacccatcttttctaattttgcgccatagctttcagcaaatctatgacagataacataatcagcatcttttgtaagagccgaattctctgcacgagttaaggatattacatgtgcaccatattctttagccttagcattagcttgtactgtttcaggagtactaccgccaagtgaagcggatataacaattgcagttttatctaatgaagctattgtaccataattgaattcgttagcagtataatgactaacacgtaaatttttcgaattattttctaaaaaatattttgctggatataattctgcttttgaagctccacatcctacaaatataacacttctaatttcttcttgtttttcttttatttcttttataatttgttttggattcataataaatccctcctatatttttattttatatatatttacatccttttaaggaatgttttcaatttatttaaaaatacctaaaatgctcaataatattccacctagaatacaaattgcaagcatccatcctgttgatactttctttcttaataaccaatacataaagaatgttatgccaagcggtatactctgtggtattatcccatttaatacatcttgtaaaacaaatttttcaccaaactgcactggagttgtaattccaatcatactggccatcatggatccaataaccataagtccaacaatagaacaaatgtacattactttatccataagcccttcattatagagctttgttaaatatttatttcccattgaatagccaattttcccaccataatatgtaacaagaaatgatggaataaatgaaataattattgctaatattggtcctaaaatactaccttgttgcgctaaattaatacctaatccaaaagccaatatacgtacagttccttgaaagaaagagtctcctactccagataatggtcccattaatgaagttttcatagcattaatcgattcaggattaaaattttctttgtcttcatagtattgttcttccattgaagcacttaatcctaaaacaaaagcatttgtttgaggtgtacaattataaaaattcatatggcgtttataagcttctttttttaattcatcatctttaggatctttatatatgttgtctaaaataggagcaattccatataaaaagcccatattcatttgtctttcatagttccatgaagcttgaattgcccaagaacgccataagaacttcatatacttccatttatttggatcattttgtttttgtatattttgcatttttatacctccaatcaatctaaaatatctaattcatcaactattttttcatttttaaatttaaattcagccaaaacaaatgctacaatacaagccgaaatagcaacaccagtcacacttaaattagaatatgctgtaatgaaaaatcctcctagtaaaaatggaagcatttttgttgacagcatagtgctaagcaataaagcaaatccataagctgttagaattttacttgataaatttagaccgtttgtaatccatgacggaatgacttctacaatattttttactaaatctgttccaaaataaattgctaaaaatattggtacaaaatacattagtgaatacaaaaatgttccccaaacaatatgaatattacaggcttttttatattccccattttcaattaacgagtcagctttatgagttaagtttgcaagaatagttctcattaaaactccaagcatttgcccaagcactgcaattggaatcgcaatagttagtgctgcctctgaatccgcatttgataaaatagcaaacgatgtagcaataatggatgccatattcatatctggtggtgctgccgctcctatgtttactaatcctaaagaaattaattcaagagcagcaccaaccattaatcctttttgaatatcgcctaaaacgagccctacaagcgtactaactattaacggtctttctaaattcattctgcctaaaagtctagagtctaaaatacaaataacaccaatgaaacctaataatattgacttaattaacattcttgatcctcctttttatattttagaagttaaatcttctctctttgaagtaggaacttgttgcatatataggttaatccccattgctttcagctttttggtatcttctaattcttctggatttaggaaaatagcattactatattgctttgaattttctttatttgcaattcccccataattaatttctttaatactagagcagctcttacagaactctaatgcttccttagtacctctaaaaacaatcataatattatcttttaattgttcaactttagacattctcgctaatatatcgtttaccgaaaatatatttaaagttactccaactggttttgataagtttaatgaaacttttttcatctcatcatttgcagtttcatcatctacaacaataattcttgaaatccctaaactttttgtccatgaaaaaactacttgtccatgtaataaacggtgatcgattcttactaatttaatcataaatcttcctcctttatatttttacattcattaagcaatttattgcagtcaactattccctgctgactttcttcaataatctgctgcaatagactttcagaaatttcatttgcttgagtagcaactgaaataattataggtaaattcattcctgaaataacatgtattttaggatattcttttattaaagacatcatttctgtattaacgcttccaccaagaatatctgtgaaaataaatatatctgcttcaatgtatttttctcttactattttttctactatttccccaacatttacttcttcgtttctataagatgaaaaagcttcaaccatagatacatctccaattatcatacccagagtatccttcattccctttgccagatcaccatgactagctaaaataatttgtatcattaagattcacctccattctatgtaattattattagcaataatcgtgccaaaaaacagtttgtattcaaaaacatactaaattggtcatttatatatacattagtaaataaaaccaacagttaaaaaaagattaattgaagtgtttgagcaaagtgttgaaaaaaataagcctaatgaaaagtataattaacttttcattaggcttatttttttctatttaatttttgaaattttattttaactccataattataattataattataatgaacgtaattatatcttatttaatacttacagtcctaaattcaatcctatcacttctatggtgtgctgttgaaaattcaaaaggctgaccattgtctaaaaaacccacctgctccacttccaatattggaaagttattttctatttctagatattcctgttccaactcatttggtaaaatagctcgaataatcctatgagcactttttattttaagtttaagatttttttcaatgtaaccataaactgaactcgttaaaatatcgttttttatgccaggtataagtcctattggcatatatgtatactcaattacatatggactatcatccgcgtatctagttcttattacataataaacaaaatcatcagtagtaatctttagcttagttgcaatttcttccgttgggtgaattacttcgaattttacaattttagatgttacttttctgtccttatgagcttctgaaaatccttcaaattgttttgctagacttaattcctgaaccccctcttcatcaagagcttttacaaatgttccagaacctcttcgttttattactaatccttgaattactagttcatcaacagctttttttattgttattctactaaccccataatattcacacatttctttttctaaaggcaactgttcattaggattatattcaccattcaatattctatttcttatgtcttcagcaatttcatcatattttgccattatattcacctttctccttacagtataacttatatacatgtttatcatatcatttatatattaattatatcatttctatacattattaaacacttaaattaagtttaattataaggtaattatatatgttcaataaaataatatatataaaaattattagtatcttcattcaattaaaatctactgtttatagtgactttactagtgatggtaaatacatctaataaaaaaattcctgaacatcataactctaacacacaattcatattaaaatatgatataaattgtacaaaaaaagaaatcattcttgatttccttcaaaataataaaaactatattaaaaaactcaccgttattttaatatagtttaaaattttaatttcacctattttacaattacttaattgcatttgccatttcttcgtctattattactgttacatctttatgcatgtgtaacatagttgcaggattatgagttgtaatatttcctttaaataatccttttattgcttctgctttatcttgacctcttactaacaatactatttttctagctttcattatttgaccaagacccatagataacgcctttgtaggtacttcctctatagacttgaaaaatctagaatttgcctctattgtagttttagttaaacctgttacatgagtttctgctattaaaaaatcatctggttcattaaatgcaatatggccattagcacctattccaaggatttgtatatcaataccacctaattcatccacttttttatcataattcttagcttcttcatcaagatcttttgctaagccatttggaacaaatgtatttgctttatttatattaacatgattaaataacttttcattcataaaatatctgtagctttgaggatcttcccctccaagtccaacatattcatctaagtttactgtttttatattagaaaaatctatttctttatttctgttcatttctataatctttttatataaaccttcaggagtacttcctgtagctagtcctaggacagcatttgttttctcagaaattacctccttaaatattttagctgcaacttcactcatttcttcataatctttaactactagtaacttcattattattacgctcctttgatgttaattttttaaacaaaccctgtatctatatttatctcctctcgctattgttatggtatattcaacaatctcattttgctcatatgctattctttcaaactttaatcctgcctgcccttgaggtatttctaaataaacactttctaatttatttattaaaacactttctattacttcttcagcagatgtaatgttaatattaaaagtattttttaatatctcatataatggattttcttctatcatattcctagtaagctgcttaaatctttcatacggcaaataagtcatttcatatatcataggaatgttatccgcaatccttattctcgagattttatacacaagctcgttcttttctatatttaattttttagacactttgctgttggcttccattatctcaaaatttaataatttagaagtcggattttttccacgttttttcatttcctctgtaaaagatgatacctttattaaatcttgttctacaactcttggcgaaatgaaatttccttttccttgaactttataaatataattatttttttccaactcgtctaatgcttctcttactgtagttctgctaacagcatattttttgcatatttctctttcggagtccaatttttcattttcttccatgctgctttctattttttcaatgagaatattcattagttgaacatacaaaggaatattagaatttttatttatcgtactcataagtgcacctcttttagttctagtagttttcccaacaattatactattcttgtacacaaaagaaaatataaatcaaataatttaaaatttcctataaacgcttcttttaagtactttcaattctgtaattccttaaataattaatatttttcaagtggtaattaccactaagggaattataatttattcttttaattctgtcaacatacacttgaaaaattctttatacatgctatatactgaatatataaactgataatgtccacttactataatatatgaaatttgacttaaaaggagaagaaatatgttaataagaaattgtaatataatttacctagacaagatagaacaaggctcaattctagttgaagatgggaaaattaaagagataaatccgtctaatatagatacagatagcattttagatgcaaatggtctatatgtttcacctggttttattgatgttcatatacacggcgcaggaggctcagatacaatggacggtaccagtgaatcaattaataccatttctaaaactataattaaacacggaacaacttctttcactcctacaactatgactgttgctgtggacgatataagaaaatctttagatgcaattaaaaaagtaaaagaaaaaggttcagacggtgctcatattcttggagtgcacttagaaggtccatttgtaagtccgaaagcaattggtgctcaaaatcctaattatattttggcgccatctatttcaacctacaatgatatagttaaggattatgaggatattattatatctataacattagctccagaagttgaaggtgctaaagaacttattaagtatttatcctcaattggaatagtctgctcattaggtcatagcagtgctacgtatgaagaggctatggaagctattgaatgtggtgcttgccatgcaactcatctttttaatgctatgactcctttaactcacagaaatccaggagtagtaggagctgtatttgacagtgatataacaactgaaactatttcagatggaattcatatttcatacccagctttaagaattgcttacaaacaaaaaggtactgataatgttttattaatctctgatgctatgatggcttgctgcatgcctaatggtaactactccttaggagggcaagatgttattgttaatgatggtgaagcacgcttaaaaaatggtgctttagctggttctgttcttacccttgataaagcagtaaaaaatgtatacaaaaactctaatttaccactttatgaagtaataaaaatggcatcttataatggcgctaaacattgtaaagttgagaatcataaagggcagatcaaggaaggctatgatgcagacttgatattgtttgatgatgatataaatataaaaaaggtattagttttgggtaaggaagtatactcagaataactattaaagtttttagctgtatttctacttttaaaaactcatggaataaaattatatacgcaaatatataaccaatctactgaacatttaggataatctattatcataacaaagagaagactgagttatttcaaaattaataataaagtgatcaattgccaatttttaaatgatgcatctaagaatcactttccttttgaaatagctcagtaattataaataatttaatactctaatttatagaattttttctctttgaatataattacataatgctcctaatttatttgcatcatttccatatttgcatgcctttataactggttttattgttccttctaggccattattcatcattatatctagtcttttgtttatttcatcaacataatcttttctttcacttattgcaccacctaaaataattacttctggatcatagatatactgaatattgtagattccaatggccattataaaatagtacttatttacttcttgaagtgcaatttgatctcccttactgcacatttcaaaaacctctacaccgttaatatccccttcatctaatccctttagccttgcaaccttttcagccagtgcttttgtagaacctgatttactccaacttgtgaatttaggtgtcccatctaattcataatccattgagcaatatccaaattctccaccatgtttatgaactcccacatgaatttttttatctttaactattgctcctcctattcctgaaccacaaactacaaaagctaaatctttattgtccttcccagctccaagccaacattccccaagggctgcgcaattagcatcgttttcaagttcaacgtttaaatttgtcttttcatttaaaatctctttaaagttaggcccatgtatatatggaatagcacttgttcctcctattaatccactttcactatcaactgctcctggagcacttattgcaattcctttaacatcaaatttttccttcatttcattggttgttcttgataacttagaaaaaaattcttctttatcacttggaacattaaacttcccattttcaataaattctccattttcgttaattacagaccattttactgagcttccacctatatcaaaagccataaattttctcattgaaaaatcacctctatatttaaaatctagttataatataattcaaatagccgtctcaatattattgttttgagacagccatttgattgttaaatataattttctatctaaaatccgttattttttgctacttctttaatccatcttcctgattttttaattgtcttcttttgagtagctaaatctacagcaataaatccatatctatttttatatgcattagcccatgaccaacagtctatcggagtccatgtatgataaccaaaacaattagatccttcacttatccctttatgaagatatgataaatgctcctcatagaactctattctataatcatcttctataactccatctgcatttatatatttttcttccccttcaactcccattccattttcagatatgtaccatggaatgttgttataattatctcttatattaatcgctatatcatacatacattgtgggtatatctcccatcctctatatggattcattcttcttcctggcatttcataatcgtcaaaatacttattaggcatccaaccttttgaatcgtcgaatttttcttccttagcttttgctcttcttggttgataataattaactcctaagaagtcaattgtgttgttttttattatttctaattcttcttctgttgattcccatattacattatctttggttaaaacttcaactaaatccgttgtaaactcaccttttatagctggatccaaaaatgaattgttaaagaaatcttctgcaaatttagctgcttttacatcttcttcattttgtgatcttgggtatgaaggcgttaaattaagaataatgccaatcttcccaccattcttaccacaatttgattctttaaactcttttatagcctttgctgatgccaaatttagattatataaaacttgcaccgcttttttcccatcaactatctttggataatggaattgatataaatattcaccttcaacaacaaccataggttcattaaatgttgcccaatgtttaactctatctccaaataactcaaagcacttctttgcaaacaatgcaaataagtctactacatgttttgattcccatccgccatatttatcatataattcaactggtaaatcaaagtggtgtagattcataactgggatgatattatttgcaatacattcatctattacagcattgtagaatcttacaccatcttcatctacttctccagtttcaaaatcttttattaatcttgtccattgaattgatgttctaatactatttaaacctatttctttaatcaattttaaatcttctttatagctgttataaaagtttgatgctacattagggcctactccattaaaaaatgcttctggttctatattaaaccaatgatcaaatacactattatgctttttattaaatcgtccttcactttgtggacctgatgttgctgatccccaccaaaaattttctgggaacttgaattgtatactcatcttatgcctcctagatttctttatttaaattattttatttccttcatgcgttaaatatttacaaaatgaaatagtattttcttctataacattgctgcaccaataagacctgcattatcaccaatttgcgctattcttatatcaacaatagatggatctgaaaccttagtcttagtgcactcaataattttaggtagcaaataagtattatatattaatactcctccaccaataactacagtttctggatctactacagctatcacattagctataccaattgaaatattgttaatccatttttctattacctggacagccttttcatcattgcttttatacagatcaaacacttcctttgtgcttaatgtttttccatatgcttctgatgctattctagctatatttacaccactacattgtccttcaagtccgcctttatttgtacctgcgtgactatacttgtcctcatttattatcatgttgtagatttctgctgtttgactatgtgctccatttataatcttcttgtcaataattaatgctccgccaactccagtagaaaccgttatataaaatactgattcgcattctttagcacttccaactaaactttctgcaagccctgctacattagcgtcattattaacttgaacaggtaatcccaatttctcacttagatattcttttatattaaagttttcccatccttttaaattaacagggtttaataatttacctacttttaaatctagtggccctggtgcacctactcccactttttctatttcataactgctccattgtccctttatttgattaactaatttatttaagttataagctgcccccttttgcacttcgttttcaactttaaatatttgtactatatctccctccttggatataactgctgcccttaaatttgtaccacctatatctattcctataaaaaacgatattgtaatctccccctaactatattaataatcattttggtatttactttattaatataaattactctcctgtattcaattatataacactatatatcagttatcaatgatatgttatatcatttagatttaaataatattatttttattcacgttctatgaattcaatctcattcatctagttttactgaataaaaaagatagacgatatatctgttataatcttatataacaaatatatcgtctattatttatagcttctctcttctctttgtagactttataaatatctcctttaaagtttctttgtcatcatcttttattgcatcttttattttatccaattctacttcaaaattttcaatgctttttaatagattctctttatttccaagaaaaagttcgctccaaaggtcttcatttatattagcaattcttgttaaatcacgatagctatctccaatgaaacttcctgtttctcttccttcaacatcgctatttaccagtgctacagctaatgagtgcggaagctgacttgtgtagccaatcatttcatcatgatattctggagttattcttttaactcttttaaatccaattttataaatcagatcttctaccatgtttaaattttcttctttatttctagaaaccggtgttaaaatataatttgcacctttaaaaacttggctacttgcaaaatctattccttttttctcccgtcctgccattggatggccaaaaacaaaatctatattctccggtaatatatttacaatatcttcgataaacatttttttaattccagtagcatctgttattactgcaccatctttaaaattgcttttattatctataataaattgcttaactaatctaggatataatgaaataattataaaatctgcactcttaattacttcttctccgtttttgaagccttctcttattaatccaagttttttagctttttctagagattcttcattaatatctattccataaacatctttatacccagcttcttttaaagccatagtaaatgatcccccaattactccaagacctacaactactattttcatatctatagctcccttatatagaattagatttgcttatcttcaatttttgctacagctttaactttactcattagcacatcaaattgatctggagtaagtgattgttgtccatcacttagtgcattttcaggatcgttatgaacttctatcataagtccatcagccccagctataattgctgcttttgccattggttctaccaagtaagcataaccacctgcatgacttggatcaacaattataggtaaatgagataatttcttaattactggaactgcttgcaaatctaatgtatttcttgtaatagtttcgaatgttcttactcctctttcacaaagaattacattttcatttccacctgccatgatatattctgctgacataagccattcttctatagttgcagataaacctctctttaatagtattggtttatttgttttacctatttgctttaatagatcgaaattttgcatatttctagcaccaatttgaatcatatccacttcttcaacaaaagtatctaagtaatcagtagacataagttctgttactataggaagtcctgtttcctgttttgctgtttttaaaagttttaatccttcaagctctaaaccttgaaagctataaggtgaagttcttggtttaaatgccccacctcttaaaaagttggctcctgctgcttttactctttttgcgatttcaacaatttgttcttcactttctacagaacacggtccagccattattccaagtcttccaccgccaactattgatccctcaatattaactactgtatcttcaggcttaaatatcctgtttgctttcttaaaaggttcctgaaccttcataaccctatctacaccttttaatacttgtaattttttaggatctaatattgaagtatcaccaacagctcctactataaaatatgtgtctcctttagaaagatgagcttctaatccttttgattcaattactgcctttaccttccttacatcttcctcacttgcttttgggttcataataattatcatcttaatttcctcctgtactactttttaattttttacttttcttttttctactatacttctgtactacaaacagatagctcagatccaaaattagttgagaactttctcctcagcgaataaagtaggccgagcttcctatatataatataaactatttagacatctttttcaattctagcgccttaatagctaatatatatccatcttctccaaatccacacatctgtcctatacaagcgggtgctgttacagatttctttctaaaatcttctctcgcatgcacattggacaaatgcacttctactgtatcaatatttattccttttattgcatcatgaattgcataactataatgagtataagctcctggatttattattatcccatcataattttcaaagtatgccttttgaagttcatcaattatttcaccttcacaattactctgaaataaagttatttcatgtcctctttttttgccttcttctttaatatactcacatatatcttcaaaagatttagctccataaatccctttttctctaactccaaccatatttaaattcggtccatttattaccattatcttcattaatactccctcccttcagcatttatatttttttaactataatgtatattacaataaattatttagttagcgagttttctcaacataagttgtgatagtaaattatattaattctataagattacaatgtaagattttcaacataacatatatatgtacattgcaactgagtttctacactttcttctagtttagtacttggcttactagaatttcaaaaataagtttattattgcatcttatatacttaattcatttccaagttatctagaataacttcttttatttcattaactatatttccaatttctctatcatttctaattattttatctgcacataatctatataattcatagcgctcttcatacaacttaattattttttccctaccttctttaagtaaaggtctttttgatatatccacatctcctaaaagttcttctaatggtctatcaataaaaataataaacgattcttcttttaatatgtctatattctcttttctttttactactccaccacctgaagaaattatagcctttccctctttagctaattctctacaagctaaagattcaaaatctctaaaataattctctccgtgttcaaaaagttcaggtatcgttttagatgtcatattttcaatataattatccatatcaataaagttaatttttaattcttcgcttaccaatctgccaattgtactctttccgcatccaggcattccaatgaatactactttgtttttcatatgtgccacctacttaaattcattttcaaatattgaatataaaccttgagttagtttattatctaattggcattcctgccatatttcttccgcctttatagcttgccctactagcatttcaataccaccacatacttttttatttgaatttttccctatttttaggaaccttgtctccctcgggttataaattatatctattaatgaattaaagttatttattatatcctcattaacaggagtatcatcaactttagggtacatgccaagcggagtcgtattaattaaaatatcaccttttatctctgatatttcttcataagttttaaattctattctttcatctttatctgcagaattccctttgatttttcttgaaactaagtaaatctttttaatgccatgatctaaaaggtaagtaataacagccttagccgctccaccatttcctagaaccatcgcaacattatctcttataacaatctcattattatttaatatagttccaaacccataataatctgtattgtacccatataacttattatcttctaaataaatagtatttactgctcctatttttttagcttcatccgatataaaatctaaatattccattacatcttgcttataaggaatagttacattaactccttttattttaagaagctttattgattctataagtttacctaaattctctttttcaacttcaaaaagcttatatgccccttctatttttaaatctttaaaaagcgtattatgaattttaggtgaaagactatgagataacttttctcctattaatccgtaaaattccaaattaatgcccccttttaacagtatttcctgtatccaccaataagtttaaaatatgcactgctttgttcaattaaattcaatgcctttttaacttgttcattttcaagattaccctcaaaatctacatataagaaatatttccacgctcccttttccataggtcttgattcgatcttcatcatatttatattattttctgcaaagtgtcttaataatttatatagagtacctgctttatgctcaagagaaaatacaacacttactttatcacaactgttatttaattccaattcttttgatataactataaatcttgtagaattttctcttctattatttatattttcttttattatgcttaaattatatatatcagctgctcttttacttgcaatagcaacctttgacatatcttgtaaatcactaacaagtttaacactatccgcagtactatggaaaggtatctttttccaattactatatccttttaaaaaatcagtactttgttcaaacccttgtggatgtgaatatacttctttaacattatctaatttagttcctttaattccaattaaattttgatctattttaatgcactcttctccaactatatagaatccatacttatacaagagatcgtaaacctgtgaaatagcaccagttgaagaattttcaattggtaaaactccataatcaatttcttcatttttcactgctaaaaatacatcctcaaattcatcatacgccttagcatcatctttcttaccaaaatgcttaatcattgcttcttctgaaaatgatcctgcaacaccataaaagccaactttaatgtcacttttcacatttttttcttcaaacttatctatagtcgtagctcttatatctccctttacttctttatcttctaaatctttagaaatattcataatattaataaaaaattgtttcaacccttcggcataatctttattattaaggtatcctatattcttttcaataacttcatcttctctagctttattgaaaacaggtaaattattctgttttttatattctcctacctttattactacatccattctttcttcaaaaagtcttgttatctctttatctatttcatcaatcttatttctataatcatctatagccgccatttcatttctccttacttaggaacaattaaaaaatatttaatttctttaatgcaccttaactcattcaaattaacactttgctttcttaatacactatttgcaataagaaaactatatattcattaacttagaattataaatttttattactaaagcactaaatcaagtattccaattgcggttacagcttctattactggaacagctctttgcacgatacaaggatcatgacgaccttcaataacaagctctgcttccttttcttctgcaatatctatcgttctttgaatttttgatattgatggtgttggctttattccaaccttaaataatattggcattccatttgttattccacctgtaattccaccattattattagtataagtttttactttatcaccgtcataatagtattcatcattacaatcagatcctcttaatttgctcatttcaaagccttttccaaattctattcccttaactgctgggacagaaaacattaaatgagctagagttgattcaactgaatcaaaaaacggattaccgattcccggatttattccaataacagtacattcaatagttccacctacagaatcttgttctttttttgctttcagaattgtatctctcatttcttcttctttttcttggattaataaaggcaattcctttgtttttaattcccctaaaagttctctgcttaattctacatcgtaaaaactcttatcttcaacattttcaatactcttaacatgggctcctatgttaattcctttactttctagtacttgctggcatacagctccagcaaatactaatggtgcagtaattcttcccgagaaagatcctccgcctctatagtcgttaaatccattatatctgatgaaccctgggtagtctgcatgacctggtctcattaaatctttaagctttccataatctttagaacgcatatctgcatttctaatcactgcacaaagaggagttcctgtagtctttccttcaaataatccacttaaaatttctggtgcatctgcttcttttctagctgtagataaattactttttcctggcgcacgtcttgccatttctttcataacctcttcaagattaatctcaacgcctgaaggaagcccatcaattgtaattccaatcccaactccgtgagattcaccaaatatagaaacctttaatttattcccccacattccactcatcaaacacacctcctaaattcttaaaatcatcccaaaattgcgggtatgactttgacacacactcataatctttaagtataatacgttctttacacatagttgatgctatagccatagtcattgctattctatgatctttatgactccaaacttccacgtttcctttaagctcctttacaccttcaattatcaatccttcttctttttcaataattttagcacctaatttattaagctctgaagttactgctgctaatctatcacattccttaattctaagtcttcctgcatttataatttctgttgttccttcacttaatgcagcaaccaatgatactactgggattatatctggacactgagaaccatcaattatagtagacttaagtccaagacttgcgcttccaattaaaccattatctttattatttaatttcaatcccattctttgtaatatgtcaattacttctttatccccttgaagagaatctagtttcaagtcattaagcacaatattgcttgaaagtgcatcagcacagaagaagaatgctgcttgtgagtagtcaccttcaactctgtaatctatactcttataaatttgatttccctttataataaattcttcataattattatttataatttctacaccaaagtctttaatggctcttaaagttaaatcaatatatccttttgattccatttctgttgtaattacaatcttagagtctccatctaaaagaggaagcgtaaataataatcctgttataaactgcgagctaatattcccctccatcttaaactctccagcttttaattttccttcagtctttaaatcaagaataccatctttataagaatatttaattccttgttcatcaaaaattttgtaataagtgtctaatggtctctttcctaaattacctcttccaacaaatctattaactccatcaaataaagctgctataggtactaaaaatctaagagttgatcctgactcgttgcaatctatagttctttgttccttaactgaattagctttaatattttctggactgttgattccataaacctccagataatcttcttttttcgttattttagctcccaatgatgacattgcttcaattgtagcaataatatcatcagaataatctatatttgtaaccttactaacaccatctccaagagctgcgcaaattactgctctatgtgccatacttttagatggcggtatcttaacttccccacttaattttccaggataaatttttaagttccccatgattttacctcacttttttattcattgcttaagacatactcaaaaataacatatctgcttgctaacctattttttcatatacatcattaactaaaaaattctacatttgttttttctaaatatgattctccaatatttcttaataatactacttttaatacattatcaatatttttcttatctaatgctattgtatctaaaacttccgagctatcatctatttcaacttcataaggaagattgtattgcactagtatctctcttatctcttcactaacgccttgatcagttaatcctttattttctgcaatcttacttatttcatacattcctatagctactgcttccccatgtgtaaacttcttaaagttataatatgtctctatggcatgacctagtgtatgtccaaaatttagcagcattctctctccagtatctttttcatcattttccacaacgcatttttttataaagcaacatttgtggataattttttctatattgttcataacctcttctttattttttaagcttttcaaaaagtaaaagaattccttatcttttatacatccgtatttaataacctctgccattccgtctctaaaaaatctttcacttaaagtttcaagtacatttggatctattaaaactaatttaggatgataaaaacttcccactaaatttttgcctctttctaaatctacagcaacctttccacctacgctgctatcaacttgagcaagaagtgaagttggtatttgaacaaaatctacacctcttaagaaagttgatgcagcaaatcctccaagatctccaattactcctccgcctaaagttataatcaagtcacttcttgtaattttaaaatctaatagttcattatatatcaaaggaagggtactaaacgctttagtttcctcacctggctctagttccattagcttaacatcatatcctgatttaattaaacatgattttatcctatctccataatgagaacctacatttttatcagttagtataaatatctttttacctttaaaaactttttggatttccagatttacttcattaattaatccttttttaattatgattggataacttctttcaccaagttcaacaactaaatcttccatttatcaacactcctcttttacttaaacagttagcatcatgactaagattacgttataactcttttctatcttttagatacttgtaatgagtaattgttaatgccgactgttctttaatttaataaatttatatttctcttccaacggccgctgcaataacttttaactcttccataagttttgcaaatttacttggctttattgattgtggaccatcacataatgcattttctggatcattatgaacttcaataataagtccatctgctccaactgcaaccgctgcttttgctagaggttcaaccatccagtactttcctgcagaatgactcggatcaattactataggtaagtgacttaattttttaacagcaggtactgcacttaagtctaaagtatttcttgtgtagttttcaaatgttcttattcctctttcgcacagaattacattttcattaccaccagccataatatattcagctgacattaaccattcctctatagttgctgataaacctcgttttaataatatcggcttgttagtttttccaagttcctttagcaaatcaaagttttgcatatttctagcgccaacttgaattacatctacattttcaacaaacgtttctatatcataaggagacataagctctgtaactattggcaatcctgtattagctcttgctttctttaaaagttctaacccttcatatttcattccctggaacgcatatggtgaagtccttggcttaaatgctccgcctcttaagaaatttgccccaatttctttaacttcttttgctatttcaatgatttgttcttcactttcaacagaacatggacctgcaatcattgctattttctttcccccaattttagctccattaatgtctactattgtatcttctggatgaaacattctatttgcttttttgaaaggttcttgaactttcataactctttcaactattccattagccgctacaactgaaggatctattgcacttgtatccccaactaatcctaagatactaacatctgatccgacaactaagctcactgaaacaccctttgcttctagttgttttgtcaatctttctatttcttcctgctttgcttttttctttaatattactaccattttatattgcccccttgcacatgtttaattatttgcgaaaaaaaaaatggaactcatgtataatgagttccataaaatatcaatgctgatatatattacaaacttatataaaatataaaaaactcattaaaaaggtatttttcagttttttgcaaaataaatagccagcgctaaaataaaagccccagaatgtaaaataaaaaaagctataaaatttttgcataactgattttacaatatccttttccatgattttctccatttctaaatttaataattattttcacgaacattaattacaatatttacatttaatctttttatcattataacaaactatatctaattgtcaatattaattatttttcatatttatagctaattcaataactgtttaacaattatagtgataaaatattaatatagtgttggaaatatgttgattaaaattaatatttatcaaattttgtataggaactttatttatagtttcaatgaaatcttgcataatttaatctgaatccataaaatatgactgccaataacttattcttttaatccgactctttttattatttatcttatttaaaactccatataatcaactgtacattcgtgcatttttagcttgttacactaattttaaatttctggtatttttctctaattttcttttataacttttttctcaattcatcactttgtatatcttataaaattaattataatatgcattcattacataaatgcaggatattattataaaatttagaaaactaaaatctaagtggtataatataactgttaagtaaaatgataaaatggaagtgtaaattgaaaaaccatctatctgctttgttcatattaaatttacttatttttatatttgtaatgtttattaaattgacatttttattaaaagaattatacttgtaggattattttgtactttaattatttactatataattctaaaatcaaaataattaatagattttattacatctatgtaattagaaataaaaaaatggaggtcgatttgagcaaaaaagctttatcagaggaaattgcacttaaattggtagcaaaaattaatagagataatcaactagataatgttaattataaaaaaatgaaatatggactagaagtaattattattaatttatctaaaacttcttttattcttttaatagctttcttattaggaatattacaaaaaactttaacaattatgctaagttttgcatttatacggcgctatgcctttggcatacatgcaaaaaatagtattagttgtacaatattaacttctatttatttctttactggagcatatatacctaattttatacatgcagacaattacatgattttacttatgttctcaaccacaatattattattatatttgtatgcaccagcagatacagatgcacgacctctaactggaaggaagttaagaaaatccttaaaaaagaaggctttattatcaggaagtattttgatgacacttacatttttcataaatgacttttctttaaaattttttattagctacggggcattatgtgaggcactcacaataataccgatcatatacaaattatttaataggagatataaaaattatgaatactatcaaagaaatattgattaaaaatttacttgaaacttcactacaatatctcggaaagcttgcagtaaatattgctgaatcttctgcttcaaagtgttgcttttccggaggcctttatgaaagcaaatttcctaaagagttattagaattagaagaatagggctagaaaattagatttaatataacttattttagtttatggataaaaagtattctcttaatttaaagaaaatacttttttcagtttatggatattactttttaatatttttgatgtataaatatattatgctttatccaaataatactgacatttccttttctatgaatgacttgtaatcatttttaaatttatacattaaaagtactcttaatcttattcctaacttttccaatcttctaaaatgcgtatgccatattttatgccttcctttataatcgataaaaaatctttctattgtttctgttatattactttacacaagttttcactgacttcgatttcaaatttattatatgtatatcttttcttataatcatttttattgtttaacataatcccaattaaaaatttaaagtccttccactttattaacaacctaaacttggatcattgtgcctaagctttaatttattgtaatataatggtgtatgttgtaaaatagttatataaatttcctatttaataaatttttaacattatttaaggagctaaaaaactatgacaataaaaattttcacttcatttgtagctatgtttgcttatgtttttgttacttataatttaaaaataatagaattcaaaaaaaaagacttcctcttaaatttagttattgtctatttaatatcaggtattggatgtttaaatcttgaaatgctttcacttccccttttttttataactatgatgattttactttttcttcaaaacaaaaaaatcattcaaaattttatctctattatgctttcaatcataatttttatagtatcagatactattcaaggtgccatttttatagaattgtttaatcaagacgttaataaacttttagataataatattatagttattctaatgcatatatcattatttttcattgctttgatattcagttcttttgttgcatatatactaaaaaaatttaaatttaatttaaaagatataaacgttagaaacaaattttctgtacttatattctcgaatattgcattaacagctttaatattttatatcaatgcaatgatcattaaatttgttcacgtagataatttaattatattaatagacagcatattatttttatcttacttttttttgactattataatggtatatattgttattattcattttaaaaatgacttagagtatgaaaataagaaaatacaatttgagagcttacaagaatatactttaaatttagaaagtatgtataatgatatgcgaaaatttaaacatgattatataaatattctttcatctatggcaggttactttgaatataaagattttgaaaaattagagaagtttttcaacaaaaaaatattaaaactaagcgaaaatatttcaaatgaaaattataagctagataaacttcagaatatcaagattgttgaattaaaaggaatattatcatcaaaagttatcagggcacaagaattagggatagatttatttattgatatcatggaacctattcagttcataaagatggatattatagatttgtgtagatctataggaattcttctagataatgcgattgaagctgccattttatgcaaagttccgagtgtaaaaataggcattataaataagaaaaattccacctgtattttaattataaattcttgtctagatgatactcctcctatttataagatgttcgcatatggattttcaacaaaaggatcgaacagggggtgcgggcttagtaatctaaaagaaatattaaataattaccagaatatatcacttgaaacaagcctcgaaaatggacagtttattcaaaatattcaagtactaaacatttcaaaataaggaggataaatgtacatgcttaatataatgatttgtgaagataatattgaacaactaataaaaatcaaaagatatattaaagacattataatgattgaaaactttgatatggagattgttttagcaacatcaaagccagaagatattataagccatctgaagaaaaataagatttctggactgtactttttagatgtggatttaaattctaatataaatggtataaaactcgcagaaataatacgagaatatgatccaagaggatttattgtttttgtaactactcatgcagaaatgagttatttaacatttatctataaagtagaagcaatggattatatcataaaagatactattgaaaatgtaaaacaaagaatacatgaatgtattttaaatgcccaaaaaaagtattcttcaaagtcaactgagcttcaaaaaaattttacatttaaagtagatgataaaattataaatattgaatatagtaaaattttatttttcgaaacttcacatactatacataaagtaattattcatgcaatggatagacaaattgaattttacgcaaaactaaaagatatagaatcacaattagataatcgcttctatagatgtcatagatcttttttagttaataaggataacataaccgaaatagatatacacaatagagtaattcacatgataaatggccaagaatgctttgttgccacacgaatgcttaagggtttactaaattagttttgtatcaatatatcttagaagtcaggaccacccgtgaaaacgagtggcttgccctgcgcctgtaaggctttgttactggccgtgctactcgcacgttgaagcatttaacttatgcaaagctcccctagtgtcattaaaatggctcttttgtgtggattttctttgttttttgcttcataatatgctttttttatatactcaaactaaacatttttaacttacaagtttgttcattttaatgctttaagcatctcaaatgaatttattctatttacaaagttagttttttctacgcatagctagaagctttccggaaccaccggtctaaccggtggtattctttatacaaaaacagaatataaattcataagaactcatattcaaataattatagtaattaataactcaatgaagatctctcaagaataataacctaattgcttaaagcattaaaaacattaaccatcccttttccataatatttatcagaattttctccttctaactttttacatgttttataaattcttttagcaacttctttaggttttaaagttttgtctttacaaagaatgagtgctgctgttgcagaaactttgggtgcagccacagatgttccttgagtataagtgtatccacccatacctgtagttaaacataaatcagatatcttttcattttcagcataatctccacctggtgcggttacatctataaattttgctccataattagaataacttgctatttaattgcacgtttgtataatgaatattccgccatatcgtcacccattttatatttaactccagtcttagaatctgtccaataacatttaccttttagatcataccctccaaaacttaaatttataacactagccccgtcatcaacagctttaattattgcagatgatgctatagatgcatttgtttttccgtctttattaaaaatccgataacttttgaatcctatgtcaggagccacaccttttgttctaccatttgctgcaatgtttcctgctacaattgttccatgaccaagcctatcaataatatcattaggatcccctgtttcagtattatctcctttaaaatctgccggtacaagattttctccccctaacaaattacttactaaatctggatggttaacatcaacgccagaatctataattcctactacaatatcatgatttcctgattctaattgaaaactcttgccattgtcagtcacttcctttatatcccattgatacatgttatatatatcagcatctgattctccatctgaattcccttgttgactaagcttcactgttttctcagtaaaaacatctatatcatgatttggtgctatggattgaattgttgaataagtttgaatattggggatcaaatcagttttacactttacttctaaacctccaatttcagacaaatcttgtactatatttccacctgaatttattataaaacttttaacattctcatcaatgcaatcatccttaaataggataatgatatctatattgtcagacttaattacttccgcctttgtatttataggtattagattaataattaaaatcatactagctagatagcacaatttttgaatcaattttaacgctttcattttacttctcccaaaaatctatattccattaatgttaaagtgataattcatatatttatataaaggtagtattaatttcaatactttaaaatctaacttcccaattcaatttcaaaatccacaatttcatcaaaagcagtattatgtgatactaatattattattttattttctttttctttcttcaatattgaatttaattgaaatgtactatcaaaatctagcgctgaatttgcttcatctagaataattacatcaggattttttaataaagttcttattatacttattttttgtttttctcctcccgaaatattgcagcttctttccgatatattagtatttaagccatcttttaatctagaaataaatttatctagtttaaatttattaacagagttttctaatacatttatattataatcatctaaattataagtaatattatttaaaatactatcttttaataaagttggttcttgctcaacaactccaatcaaatttcctcggactttatacatattaaaatctaatatatttattccattatatttaacaacaccatcatattcaccattgtataaacctgttataatattaattattgaactttttccaacaccattttcaccttttaatctataaataaacccctttttcaattcacaatttaaattagaaactatattttttccatctggatatttaaatgataaatcttctattaaaatattttctatactttgtatgttattaattccattcacttcactttctaaacccaatatctcttctattctattataagacactaatacattttgataagtttctaaaaatgataagcaataatctattccacttataattgtattaaaatatgtgccgattacagtaaattgacctatacttagttcaccattcattatttgttgtactccaagtatcaatattaggatattggccattactgtaactaacattccagaattagagaacatgttatttacctttgccaactctatagtatcactaaatactatagaaaatttatttttcaaatttttattaagtatagaaaagagtgaattaaatttaataaactttatactttctaactgtgagttaatttctccaaaatacaagttttgagattccttatatttaaaatttgctttatataattttttcttgaagaaaaaatataatattaaatatattggaattaggattattaatactgatgatatttttaaatttatttttatcaatataaatgaacttattgctaatgataaaatattaaaaattaagttttttatttgatttatagagaattctgatacagctgttgaatctgtatttactctttggttcaaataggctgcattctgattgtaaaaaaagaatattggtagctttttgatatgatctagtatatgataacttacttcaaaggttgtttttgataataacttgacatataaaatatttagaatatatgttaataatatacgtaatatacttaatgttgatataattattaaaatgccatatacacttaattttaagttcttacccgttagcacatctataaactccccatttattaaaggcagatatattgatatactccataatattaaagatattgctaaataaatactcagcttaaatttattaaaatattgaattgaaaattttaatatattcattaaaagttctcctatttcacattgattatcatttttctcaaagaatacaaagaatatattccatttactaatattgaaaaaataatactaggccattctgttatttcaatatttaataccattttaataaatacaccatatgctattagcaacgaagtaactataaaaaaaggtgtcattatttgtatagcatgcccactacctaattccttaatatcaatccatttcaaattcatactatttaaatctatttgaatatgaattactattatagctagaatctgaataatttctactatttgaagtagaataaattcataaaaattagctgatatgaagattattagtacatccacagccactaagctcgcaatacaacttaaaacacctacaaaaactttagataataaaatttgcttaccatctataggaaatgatttaagctggtttaaatatcttccctctcttgaaaacgaagttactagtgttacattagaaagtgttgtagcaaaggtatatacacatatgataatacttttaattcctgtaaaattgttttgaataatcattagcttatttcttgcagaaattataaatattagaaaccatacagcgaagacaatattaacagaaaaacaactcattttaagagctggtgtcctaattatcaacttaacatctcttataatatttgagacaattatactcctttttttaaatttatattgacttgtgtattgttctacttttttagagtcatttgaatttaatactccacttttcataattgctaaatattcattctctccaatgaaataaagtcctattaaactagaaataattattgtaatgataatcataaaatttatcattatttctttgtttatagaaaatacgacgggtatatcatttccataaaaaaatatattgaataataaattaatgatatttatatgactatttaagcttgactttaacagcatatatgttaataaagctattattatatccactataattaaccatttgttattcgtatggttaacttttgattttaagattaaagtttcaatccataatattgttaacaatattaatgtgctatatataattggaataattgatataataatttgatataagattatgtggatgtaataatgcaaactttcattatttaagaaaccataactaaataagggtattaatacaagtattgaaattataatgttatcaaaatagcaaagaatacatttagatagtactaagttacctgttcttatcggatatatgaatagttcattccaaccgctagctaaaaatagcctatttatgattgtaataaatgtaattattgtcatcataattagttcaaaatttataataaaattaaaaattaatatttcattattacttagatacaatatgttaaatactttcatcagcaagatttctgttgctccagtaagagctactactataaaaagtatatttaatattttttttattattttttgtttttcttctccaaaaataacattacgtttaatctttaaattaatttttactagagatattaattccttcatttttaaatacctccatataaatttcttctaatgtatacttagtattaaatttcgcttttaattttattagctctccataatatagagttttgcccttatcaatcaatataattttatcacagaggttttctactatttccaaaatatgagatgataaaattattgtattgccttttgctgcatattccttcataaaattttttaattcgtatgatgtttgaggatcaagtccagtaaaaggctcatccaaaatccaaacttttggactatgaattaatgatgctattaccattattttttgtttcataccttttgaaaacttatccattctggtatctaaattattttgaatattaaatctctcactaagatttaatatttgttttcttctttcattttcagatactttgtacatatctgaaacaaaattcaaatattcaatagcttttaaacataataactgattttcatcatctgatacatatccaatttgtttctttacatctatgggcctatcctttatagatatatcatttataataatatcaccctctgatacatcaagaagacctattaacatactaattgtagttgttttcccggcaccattaggtccaattaaacctataatactactattactaattttaagattaagattatttatagcagtaaaatttttatatttttttgatacattttctatagaaatcatatatttactaccaacctttcaattaccttgatttaagcaaatactcttgataactttcacaactatttaatccgctattttcccagtataaatactctgagttagttctatcataatttgatatataatactttaagcttttaaattctgtttcttgaatttctgttgaaatacatgcaaaatcatttaattcattgcaaattaagtcaacataatttatcaattcatccttcataaattcagtatcatttaacaagttaggaatcatagttgtgatttttatatctaatatgttctgagatcctagcatagttaatattttacttaaatagttattcacattaatgtttccattagacgcggatgttgttattgtaatagattttttatttgccaatctaaaaacatgaagccagtagctgattctatcaataaaagttttcatatctccacttacattatgtgcaaaaactggacttcctaaaataattaaatctgcctctaatattttttctttaattaagcccatactatcattattatcctgaacacaattacccttaagaaaacaattattacagctcagacatggcataatttcatacttatcaggtgtaattatttcatattgtatattcccacatttatttactattttatctaataacaatttcgtaaatttatacgtaattgatttatcaccttttctacttcctataactcctaatatttttttcatatctgttctccactcatttaaatataaaattaactaaatcatatttattatgcttggtattctattattgaaatatctcaatatttcatacccaattccacttaaaccattttcaatagacaaatttttaaaatggttcatctcatcaattgggtaattattagttatggcataatattgttctaaatccttcattttttcatctaatacctttttaatttcttgatccttattttttagatacaaattaattaaaatatctattataaaaataatattttcatcaatttctttttcctttattatttttaatacaaatctttttaattgattatactctatatgattattacttatatttagactcaggctccttataatattcctatactctttattgttatagaactcaattgattccaatttatatatttgttcaaaatatttattattaagttcctttatatactctaagttgaagttaaactctttgttaggatatatcgaatttattaaaataatgcaatctaataaatcaattacgctaacatcattatcatatttcaaattggttaacccttctgttaacaattgaatttctaaattatcttttaatttagagatagttttttttaaatcatatgatttattaactatatataattttccaagaactttaatagattttattgtcatcgaaagacttaatttgccattgtctaattgtttatttaaaacttcgttaattcttgattttaagtttaaaatatctgtattaaatgtatttcctaaagtacaatcaataatacttaagaaatctaataaatcttgaatcttgttgttaaataatccaagattaagaaacttctcattagaaaatacagctattatttctttaagattattgcttgaattaccatttacattgttatacatatataagtaataatatattcctaatattccttttgaatatccactttctaatttaatttttccatttatcaagttctcccaaatgcattgattttcatactttatagaaaagtattctattaattgatttatatcatttaacaaaatatctaaattttcacacttaacatcttttaccaatgatttattaaatttatataattcatttttcattcttaattttttatcaataacatttttactgttattaatagctatattaagataatctaattgtctgtttactgacttttcatcaaagttaataattctctctttaacatgatccaaagcagatttattaaagtaattttttattattcttccctttgaatctattaaatctctactagttgtaattgttttaaatagaggaatatcatcatataataaatcttccacttcagaagttattaatcttttatcattaaatggatattcccacatataatacaccattttttgaaaatttagcatgctaacagtatacttggggtgacttgcatattccaatattctggcatagttaatagtactacgcataagttgtcttacctttgtatttttaaaaacttcaatttgttttaagaattcaaatttgttcttaataataaacttgcttaattttagaaatccttcttttatacaacttttatactttatataacctattttttgtttatctaatataggaatgttattttgtgccttgatttcacactctacatagtcaaacctaggattatctacccctcccatcagcttcaaaatcttatacggtaacttttgatctttataggataatccacttatatcaattccattaccattttcatctgcaagaccagaattagatggtaaaaaagaggtacgatttattgaatcttgaatccttaaattgttgtaatcaaatatatccttagcttgtattgtaataggctgattaaaaagagtttctaaatctattaagtatggaaattctccatttgccacaatattttccttatggaagtcatttccgcttaataagaaagttatagctattagttgacctaatcgttcataatacctcataatttgatcttcattttcacaaggtgttgcttcaatatattcttctactgtgtaatcagaattataataattattagggatagcaattttttcacaatcacaatttttgtttatccatgaaattatattataaaatttctttgcaatattaagatccttaggcttatatattattttagttgtattattaaattcatatttaattacaaatttgcccttctcatgagtatcccctaaatttccagtaatattagttataatatttcctaactttatatctaatttttctgttatttctttaaagtctctgtctattctaaaaaatgattctatataagtatttaataaacattctactttaaccaccaaacgccttaacattactggatattttgcaaagaacttttgcaaatcactaacatttttaaaattacttacattatagaatttaaaattctgtttttcttggttataatattcataaactattgttttactacaaatattgaataaattctttcctatattacttaatattccatcaatttgatttgaatgaatttttatattattatatttgcatatttctttatttaactgcacattacaccaataaataaaagcatttagaaaatacattatagattcttcattataaaaattataattttgaacattagaatattcactaattatatttttatacaactcataccatttagcataacttacttcttgattatctatttctttctcacttactatagtggcgaatttttcaaaatcaatgccttctagctctagtttttttattaaattgtcatagcttaacatattatcgttcttaatccattcatctattaccttattcgctttatatttttctaataaatttcctttaaataggcttatcttctcttcagttgttaaagttttagctaaatttaattccataagtgtattcctccatttttagttatttaaaaatcacctataatttattacaggtgattttttgtttatgaaatactccaatataatcttagttgattttagtcatttgttgctgtaattgtaactgtatatgttgcacttattaaagtagctgctgttaatacactaatatcactagttggtgtaacaccaccatctttttttgctcctacttcttcatagcttggacctactttttttaatgctttttcatttaacataatcaatctctccctttactttattttatttaatgtgttaagttaacttacactaatatggtaacatcaagatagttagatagattaaatttataataaatgttttctttcatgtaataaactaactatctagtagaaaataaatatcaaattttattaaatgccagtattttattacatcaaaatataatttatatttcaaaacaaaattctagaacgattgttgggcacagttatgatgagaaataaaaaagaggtaccataattcacgacacctctacatttcatgctatgatttaatttatacctgaaccttcttaccatttggaagaatcttaatagaaactagcaaagaaattaccataattgagaaaccaaccagatacattgcagtatatccaaaatttctttggattgtactaaacatatgtggatatacaaagttagctcctgctgatcccagcacgctaacaaatgaatatgtaccagcaactagttcgtcatcaactacttctcttatatatttaaataaaaatgttaaataacaaccatacattagaccatgtaattgatcccctaaaacaactaaaggtattgaacctgttgaaaatagaagtattctagtagttcctataagaaatgctattattaaatatttcttaggctttttatcctttagatactttcctacaagcatgaatgatataaattcaacacatactcttgaaaatattgatttactatatatagagttagctagatccgcattccccgttatttcaattaaatatgttgaatatgcaaattctattgcggtatacgttcctatgattaagatattaattattccgagaattactgaatttttatttttaaatacagcaattaattttcccctatttggatttccatctgcttcaatattcttaaacttcatagctattaataatataactatacatgacattatgattcctattatatgcatagttttaaatccatattttaaaattatagttccacttaataaaactacgcacccaaatcctatggatccccattttcttatttctgaatactctacattttttctaactgctatttcctcaacatatacttcatatacatttccaattgtttgtactataattccataaagagctgcataaaaatatatgatagtcttgttaacagacattaaaaatactatcattccaataagtgcgcataaatgtatgataataaatctttttttgttttttctcatcgaaaacttacttactaaaaattgctgggaaagaattgcaaataatgctcctatagatactacagttccaacttgacttaatgataatccaactacttgattcaaatatggcacataaaaagtagtcactatactcgttactccataatttatataagtagtcagggaataataaaacttttctttgcttttcatataatgctccaatcctaatgaattaaatatttctcctattcacctctattattaaatttatatattaaattatactcagttaagaaaaagtttccataacattagcaattttgtaaaaataattatttaggtttcatgaaaaatatttttaaaactcgtttattcaatacatattagataaaatacttagacatataaaaccacccttttatttctctaagtaaaagagtggttttatcataattttaaatttcctatcctatactataatataggagataccaatctaattaaggactctttaattttgagagacaaactcctaccatcgtatatttctctagttatctcttctgagcactccatgtcctttataaactgcttttctccatcctttgcaattctatcgtcataaataaatgcattaacttcaaagttgagcttaaaacttctaatgtctaaattagctgttcctatgctcattactaacccatcagctactatggtttttgcatgaataaatccattttgataactatatattttaacaccagcttctaataattctcccacataagaacttgctgcccactgcataaagaaatgatctggttttcccggtattataatccgtacatctactcctgataatgcagagatttttaatgattccaatattggcgaatcaaggactaaatatggagtttccaaatacaaattattcttagcattattaattaattttaaataagcatttcttatatattcttccttgtgatccggcccactagttacaatctgtattccaacatcccctaagtctttcttgaattcttttgcatatttattataatcaattattttttcaccagatgcatggcaccaatccagtaaaaatctttcatttaatgcattaactgcttctccttctattctcacatgggtatctctccaaaaaccaacttctggatcctcacttatatactcttttccaacattaaaccctccaacatagccgtactgaccatcaataacaactatttttctgtgatttctataatttatacgagtatttatatgcggtaaaattcctggaaaaaacagtgaaaacttcccacctgcattcaagtattccctaagaactttttttcttagcttgcgtgatcccatactatctaataacaatctaacctctaatccacttttaactttcttagttagttcatcaagtatctgttttccaatagtatctcctctaaatatataatattcaacatgaataaactttttagcattttttatgtcttcaattaactgactaaatttttcttttccatttacatatacatcaattttattattagtagtgtattttacgccagaattattaaaatttagcctccttaaatcagcaaatttttctccgccatcatgaccgtgtctattggatttatatgtatcgtttaagttctttctcttcttttcatcaaactttattttttctttaaaaatcttttgcctgcttagattttgaccaaacatgatgtaaatcacaaatccaatgccaggtaaaatcattaatattaagatccatgcccatgttgttgtaggatcttttctttctataaacactaatgataaagaaaaaagtatatttaaaactaaagttataactgttaagcctaaaagtatgttcattgattcacatccctatattaaactctttcctattctaatattgtatcataataacttattctaaaaaaaatattatttgctttttttgagataatattacttatagtaaaaattaatttcatttttgattaggaaaactactgctaatatcattccaaatattgcataaacaataagtggtaataattttttactatataaacacatatatataagtcaacttcttgactttttttgatttcttaatatataatattattaaaattttatattgtgcgatgaataggagtattagtaataattatatcttaaagagagctgttgtttggtgtaaaatagtgttatattattatgaacttgcctaggagcttacttgttaaaagcaagtacggtagacccgttaaaataataagtgagaaggataaatttgtttttttatctcttctaattaagagtggtaccacggaaattatgctttcgtctctttgttttagagatgagagctttttttaatttatccattatcagtgcatagatctaatattttaattaaaattttgttttaataacatatttttcaattattataagcatttttcttttatatgcattatattgtgcattttacattaaaattataggaggctatatcatggcaaattacggaacaaaaattgatgaaaagtggcaaaaattttgggatgagaatgaggtttataaatttaatcctgaaaattcaggtaaaaaactctatacattagaaatgttttcttatccatcaggcgctcaattacatgctggtcactggtttaactatggtccaacagattcatgggcaagacttaagagaatgcaaggatataatgtatttcaaccaatgggatttgatgcctttggattacctgctgaaaattatgctataaaaactggaattcatcctcaagattctactttaaagaatattgagacaatggaaaaacaattgaaatctatgggtgctatgtttaattgggaaaatgaagttgttacttgtcttcctgattattataaatggactcagtggctattcttgaaactttacgagaaaggtctagcttacagaaaaaaagcacctgtaaattggtgcccatcatgcaatacagtattagctaatgaacaagttgttgatggtgtttgtgaaagatgtagtactgaggttacaaagaaagaccttactcaatggttctttaaaataactgagtacggcgatgaattgcttgataaattagatggtttagattggcctgaaaaaactaagtctatgcaaaagcactggattggaagatcttatggtgcagaggttactttcaaagtcaaggattcagatttgaaattcgatgtatttactacaagagttgatactttaaacggtgttacttatgtagttttagctcctgaaaacaaactagttgatgagttaactattccagagtataaggctgctgttgaagaatataaagaagctgctgcgaagcaatctgaaattgaaagacaatcagtttcaaaagaaaagacaggagtattcacaggatcttatgctataaatcctattaatggaaaagtagtccctatttggatttctgattatgtattggctacttatggtacaggatgtgttatggcagttcctgctcatgatgaaagagattttgcttttgcaacaaaattcaatttaccaatcgaaagagttataacagataaagaaaatactaatccagaccttccatattgcgaatatggagtacttgttaattcaggaaaattcgatggattaacaactgatgaagctaaaaagaaaatcgttgaagaattagaaaaagatgaattaggagcaatgaagaaaaacttcagattaagagactggctagtttcaagacaaagatattggggtgctccaattcctgttatatactgtgatgattgtggaatagttccagtacctgaaaaggatcttccagtgaaacttccttacaatgttgaatttacaccagatggtaaatcaccattaggtaaatgtgaggattttgtaaatacaacttgtcctcattgcgggaagcctgcaaagagagaagctgatactttagacacttttgtatgttcatctttttactatttaagatatgtagacaataaaaacgatgatgcaccttttgattctgaaaaagtcaacaaaatgcttcctgtagacaaatatgttggtggaccagaacatgcttgcatgcatttattatatgctagattcataacaaaagctttaagagatatgggatatttaaactttgacgaaccattcttaagcttaactcaccaaggattgatcttaggaccagatggacttaaaatgagtaaatcaaaaggaaatactatttctcctgatgattatattaaagaatatggagctgacgtatttagaatgtacttaatgtttggatttggttatactgaaggtggagcttggagcgacgacggaataaaatctgttggaaaattcgtggatagaattgaaagaatccttgaaaattgcagaaatataataaattcaaatgagagcactaaagattctattgattcagctgaaaaagaattaaacttctggaaacataatactattaaaggtgttactgaagacggagataaaatgcaatttaacactgcaatagcaagacttatggagcttacaaatgctcttaataagtacactcaagaaaatattaaaaacgcaaacttcttaaaagaaactatagttgatttcataaaactacttgcaccatttgctcctcactttgctgaagagcaatggagtttacttggaaataattcaacaatctttaatgaaaaatggccagaatttaaccctgctgctttagttaaagatgaagtcgaaattgcaatccaaataaatggtaaaataaaagctaaaatcatggtagcttctaatttagatgaagaaggtataaaagctgcttcattagaaaatgagactattaaagaaaatactgaaggtaaaactatagttaaagtgattgtaattaaaggaagacttgttaatatagttgtaaaataaaaaagtggccacttggccacttttttattagttatagatattcaactttaaagctatatttatgtgtcaacttaccagaatcataaatattttgttccgaaaagctatgaaaatatatttacatactaattctaattaataatttaggcatctatatatactattactttagttaaactcttacttttatttgataatattatttcaatattgaaacttatgaattaaatctatatcctgttccccaaagggtttcaatatactctggatttcctgggtccttttctatcttctttcttaacttttgtatatggactgccacagttgctgtatctccgtaataatcctctccccatattctatcgaataattgatctttagtgaaaactatattgggattagaagctaaaaataccataagctcatactcctttgtagtaagaataacctcttttccatttacgaaaactttatgtgaatctgttcttatctccaatgctttatggctaataatattgagttggggtctatttcctgataacctctcatatctaagcatatgagactttattctggctactaattctgcaggactaaaaggttttgttaaataatcatctgcaccaaatcctaacccctttattttatcaatatcttcacttcttgctgatactattattataggtatttcatatttttctctaacttctcttactatttcatacccatctttgcctggtagcattaaatcaactattataagatcatatgtaccaataagagctttttttaatccttgaataccatcctgaattatttccactttataaccatttaattgaagatactctttttctagttcagcgatatttatatcatcttctataattaatatttgtttcatatgcttcctcctctttattatttatgccttaaatgacacatgtcagatatctatgattcgtatcactatttaatcacgaataacatctgcacactccttagcattgtgccccttgttggtataaattcagctatagttctctccacctgaaaagcttcactttattggtagctctatagtaaacgtacttcctttccccattatacttgatgcataaatttttcctccatgagcttctaccatttcctttgcaattgcaagtcctaaacctgtactcataaagtcttttgtacgttctgtatctatacggtaaaatctattaaatatatttgaaagtttatcttctggaatcccaggaccattatctttaatttctatcttaatccattcattattattacttaattctactttaattattgaatctttttgccttccatattttatagcattccctataacattcctaataacttgatatattctttttccatctatgttaatttctaattcttccgacaacctatcttcaaatttaaattcaatatccttttctttaagaacaaaatcaaactcttccataagatcactcataaatgccttaaatttaactatcccaaaattaaaatctaatttttgcatatctaattttgaaaataaaaacaaatcatcaataaggttatttatataagtagtattattatgaattatatttagataattgttcactttatctggtgaagtaacaacaccatccactaaggcttcaatatatccattaattgaagtaattggtgtttttaagtcatgggaaatattagctatcaatgcttttctattttcttcatattcaagtttcatctcttcagatttttttaaggtttcagccatcttattaaaatcatatattaaaattcctatttcattatatacgtcgttatcaattttcacgtcataattacccctagctatctgttcaacaccatcttttaacttctctataggtttcataattcttttttccattctcatagttatatatatatgagagctttgatgaataataaaaattattgcaaaaaatatagtaattgcctttacatctacaaatttaaatatggaaaaaacaagtaacatgcttattaaaattcccgttggacgcatccatcttagatatctatgtatcctattaaattcattaaattgtttatgatgagacttatgatgtattttttgatgctcataaactaactcataacgcatttcatttaactctttgagtttttcaaaaaattcccgatgttcttcatcaattctattatgaaaatgagaataaactcttcctctaaaccttctaatgctttccacctccttaaaataaatttctaccattgtaatgattataacattacaaattaacttttaataaattaaattaaaactgtctattaataattctaataaaatcattctatgagatacttaaattttgatttggaacaaagttccttatttacttatttatttataaatgaaaatctctaaataattgaattttacatcaataatttagagatttctgaatttcaacccctctttacattaagaaatactcatttttcttaatagatttttcacatcagttgcatatatatatttatcatcttctttaatcatcactctagtgcgacatttaaagcatttattatcacaatgcgttgtctcaaattgaattcctctattatttagagcttcaactaattcattatactttctagtgttagtacaaataagatatttgggcatttactactatctcctaactcaattaatttaccaaactaaatctagtgatccatttacagcattttcgcctttagaagaaatttctactttctcaacttcattatttttatttgcatatatttttaatatagcatcgctgttttcagaacataatagttcttttataaatttatgatgcttatgaaaacctctatcatcactttccttcatttgtcttatatgctccattatcttttcttcatccattcctttatggaattctttatgcatgtccttgatttctttaaatacctctttcaattctaaagaaataatagccttttcatctttttcctccacttgcacattatttaataaatttaatataaaagtaacttttgaaagtcctccttttattccaccgtgaccatgcattccgtgcatattcattccatgattatgcattcctctatgaaatccatgatccgggcactcctttatattaaattcagaattactatcatgttttacttttttgccttcagcatctaaatcaacacttatgttagcttttgtttccccacttttagtattagtttcaaattcattggaaaatgataatacttttacatctcctttagttgcttccaattttacgcttcctttaaacacttctttttccttcatagttttaaatacatcatataatactttaattttattcatttataacgcctcccaatatttttaaagatttatttccttgcttgttatgaattcattataaaatctaattttaaaaatcttttaaagcaattataaaaattttataaaaaaatagaaatccctcaaaagggatttctatttatactatctaagaaaagcatcaaggcttttcttcccaggttgctaattctaaattaacatatataaattgacttatttaattacattttgcggagtaccttttaaccatttttttatattatcaaaaacaataacagctctcttttcgaaagcttcagctgttgcaaatgcaacatgaggagtaactattaaattctttgctccaaacaatacatgatctgtaggaattggtggctcaatttcaaatacatctactcccgcaccagcaattttgccattatttaaagcttccgcaagtgctgaactatctaaaacaggacctcgtgctgtatttattaaaattgcactttctttcattaatgataatttttcattatttattaatcctttagtgctttcatttagtggaacatgaagcgatactatatcacaagtagccattaatgtatctaaatctacaaattcgattccttcaacatcttttttagtcctgctataagcgtatacattacatccaaatgctttagcaattgcggcagttctcatacctatagctcctgcccctactactccaaacttctttcctgcgagttcgaatccaacaagcccattctttgttccaccttctctagtcaccttatcacatggtataatatttctatatagagaaataaccataccaaatactaagtctgcaactgcagcagttgagtatccagcacaattgcatactaaaatgtctctttccttacagtaatccattgcaacatggtctactcctgtaaacgcaacacaaatcattttcaaatttggacagttttctattacctcttttttatatagaagattagatagtactacagcatcagcatctttgcttctttctattaatgtttcggtatcttctactcttgtatcataatatattatgtctacttcatttcctaaactatcctttgccattcccaacaacttatccttatttacacctaatggctctaatatcactaatttcattttcttcattctcctttatatattaatttatatttaaaaatgatttgtcaaaagtgctttatatatatttatatgatacatccccatcagaatcttttgaatagatatatgcgaaattttttattttaattatcctcagataaaaaaaagattcggatattttcttctagagtatctaagaaaacatccgaaccttttttcatattaaccaacatataagtgatatttctgaatgcaatttcggaaataaaattgaaatatcagtatatgatgaattacatgaatttgcaaatagtatttacatatcttatttgttgcttcaacttactaactcttaattttattattataaataagacttagtaagttgagcatatttacgaacttagttttaaaataataatgtatagattttgagcaatataattcattcgttataagagtgcttaccttgcattgactgatgacttaatgcagattttgatacttataattcttagaacgtattgctcataaatacaactatttttcaaaatctttatacattaaacttggctgtattcctttattattctgatattttccactgctatataaatcatattctccatggatatcatgataatatatttgacatatttctacgttaggataaacttttattggctgaacacaaaaaatttctaacgtccagtagcctgaaaatccaatatctccgaatccagctgtaacatgaataaataaccctaatctacctgttgaagagcgcccttcaagcatagggacatatttactagtactagtaaattcatttgttcttcctaaatataatttacctggttctaataataatccatcctctggaatttttataacttttgttggatttggagttttcatatctaaaatatcattttcataaactaataattcattatgtaaagacaaattgtaactattaggatttatttttttctcatcaaaaggttcaattattatattactaccaatattttttaatatttcttttcctgataatatcattagttctcctccaagctatatactttaataaatagttcataatgtattgttttaatgtattaaagctaataaattctaaatgcctaaccaataatatcacaatatataagaaaatttatgcatttaagatttctttaaactcaaacaatacttttttaacattctcttcatctaaaggcttatagctatttaaatatcctgaagcatctagagcttcatatgctttcttactcattgaaatccaattttcaggtatataaatccacactatatcctcatatttacaacttaacaaaaaatgttccaatcctctaaatgcatattcttcaatttcgtgaagttcatttagaattttataatcctcaactattttagaacttaactcacatttatatatatctacatagaagaaatcaaatttattttttttggctttaaaggcatcaccttttactattcgtatcttttcatttttaggaaaattattattatataattttattatttcttcactaatttcatatactattacttcttctacgctatcttttcttgcaatttcttgaactacatatccaataccaagtccaattacgccaacttttccgtgggcaaaagaaattgccccatatgaactttcaactagctctggtgttagcttcattaaatcattatcatttttatataattgaactatatctatatcatattcttcttcattttcatacatataaccttgtaattcttgctttaatatggtatctttaactattttatagtcgccacaagttccttgattaattaagtcactatatcgctttatctcttggaacacaaaacttttattatatggtttcatagttaattccccttcttacaatatttaatgcaaaatctttagtagtcctatttattatagcacattttccaatttatgtataatattgtataatttatttattaacattatatattcaataaaccataatataatagcacattcttagccataatataactattaatattaactttttattttaatatatatatgctatacttactttaatgatttaatatcattaatatttcataaagtaggtgtttatatatgaaaaatgttaatataagtgaagaagcttataatgaatttaaagcttttttagacgaaaataaaataactgatttcaatattagaataaattttgctggttatgcatgtagcggtccagtttttaacatatctgtctcagaagctactgatgctgacgaagttgaaaaaatgaatgatatttcatttatatacgaaaaatccctaatagaacaatttggtggatttataatactttcgtctgatgaaaatgaaggtaatggcttaagcttaaagcctgttatagcgcctgaaggcggatgtggtggttcttgctcaggatgccactaaaatcataataaaaaatgtagaataaatgaagaatatttattctacatttttttgttgttatgagtttttgtactatctaacatttcccttacaaaaagcttgattcttaccctacagttaatcactttacttatttgtactatcccccgactctattttccactgcacattcccatagtcatcacttattttatatataccttccaaaagatctatccaataatgattttttataaccttactttccttatcttcacctgtagctccctttaaattttcttcattaaattcattaaaatattcatatgtttttgaagaaatctcatacatatatttaaaagattgtaaatcttcactttctagccttattttatttgattcatttttcatctctttacttaaagtagacagcatatactcctttatcttttcatttatattattttccattatcttatcagttttaattaccttggaaaaaaacggtatcgcattttgagtatatgctctatactgttgccataattctattatgtcatcagacatttcatcataattcttataaagttttaataaatcttcattttttaaactattctcttcaattcctttagacaatatatccatattactttcatttctttgcttaaaatcctctatcttagtataggattcctgacctagtttatatttgtaattatttaatttaaatactacatatatattaagtactatacttactacaagaagtatagataaaaaccttgtataatctgtaattttcattccttgggtcaagaatatcactcctctatactgtaatttattttaacatattaccttatatttgcctatttaaaattagttaataatttccctatctagcccagtcgtgtatagcttcatttaccattttcaatccaatatttccacctgagctttccttcttttcagtatttattcttttaatctctccataaggattttttaatgataattcttcatttccagatacaacccatatagtttttttgttaattggctttacttcaagttcgctttctccaacaccatctgtaaaatatattaatacagcacttcttaaattattttcatttatatacttaaatacaggtgtaaatttcgtagatccattatctttgcttctctttcttatgtcattctcatttcttaagtcatatacttttctaatttcactatcacattcgataattgtgattttatttttaatatttgaagttattgacaatatctccactagtatcttatgcatgtcactgtccttcatgctagcacttatatctattgctacaattaattcagtttgacttttaggtagcctccctcttaaatctaatctttccggctgtcttctatcccttcttgttattgtcctcttatatcctgatttcacacttgggagtatatttttaagaacaagttgccaaggtatttctgccttttctttatacgctaaaattatgttttctaatccttttggagtgttttcattataagcacttagagccgttttcttagtcaaattgctaatatcttcatcacttatttgagcactttcccacaaatcatggacttttgacatatccacttcatatttcgaatcatcatctttatcaactttatcttgctttattctagacttaattgacttatgaatttcttctgcatattcctcgacacttctattttcctcaagtgataaattatattccatgttaactgcataaagtcttttgctaaagggtggtaaatcttttatatactgattaattgaaatatctaaagcaacatttaccgcttctttactaaatctatccttcaattttctttctctttcaaaatgagaattcattatatgatatatttcatgtttaaataatgctgccatttcttttctattacaatccaaaaataaaaatggattaaaatacatctcaaatctatcacgctttggaatagttgctattggcgctgttaaggtagtatttattttccgttgaactctaagcatgaattgcccaaaaaaaacatcttgagtttgcaacaaatataatataatatcctctactagctcaaagaaatttcttttataattatcactaaatttatcatcttcactcaattgataggcttcttttaaaagttgctgtcttttttcttcaaaatccatatacaaacttagcctccttccaaagcttaattaaaaacttttatatcttaactcatcaaccaaatatattaaaaaatgcttctaagaactcttcagtacctagtaacttttcatatagtccactttccttataatctctttttatttccttcataataccaagtctcaaatctcttggatataaatttagaagttctgaaaataaccttaaattcctttctatcggcatattttccaaataccttaacgaatttttagacaatatgtataatctagaatgattttccttttctattttttcctttagatcaaaatttaaaatatcactgctgaatatatcttcaacctttactaaaggtgtttttaggtttatcaaaaagtttccaaaatcatttgcaatgctaatcccaacatttccttttacaacattcagtagagtatctaaagagtatttccccttattttttacaaataccttatatgcttttgatactctctcccagcttcttggagtagcctttattgtttcttctgaatcaggagtatgaagatattcaggaaatgtagacaaaaattctatgatatgttcatctatatttccatcattactcattccccacttaatccattctttaatatccgagtctaactttacccagacaaatctatcttcttgagctgggtccatatcaacaacatcatattgactattattaaagccatcatttttattagaaggattcattgcagctattactttaactctctcatccaaaatatatccattaatctctctatttaagataagattcataagttcttgtgctacggcatgatcgcatctattcaattcatctataaataaaataacatctctatttatatcttcatctaatgcttttttgatttcaattagcttactatgtgtcgcatatatagtcgtcctattttcaactacaggtagtcctcctatttccccttcctttagcaagtttgcatctattgtaacaagataatatccattttctcttgctatacgcttaactaatgaagtctttccaactccactttctcctataattaaaggcacatcatttgatgcgactactaaatctactgtatttaaacactctaaataattcaatcttttcacctccattcttatatagataatttataatctactagcaactttttggcatttttgcttccatattctcttacaaaattaattttatccatttccaaaacctctaactctaagaaatcttcaatatacttcttactaatatctttttctttgattttttctttaagcacatcaattacaagttctacatctatgctttcataaatatacttgactacatttatattttcatatataaatttctttatctcatctaaatcatagttggaaatataatttatagcttctccatttagctctattgcctttattttcgccttaaggcttggattctttataaatctaattgctacatagtagttttctatagccttaagctgaatttcttcagaaggattctctatatatttaattgcatcatagtccctaccaacagctaataattgaagttcctcgctaggattctctataaattgtatagcccatcctttagtcttaatagcttcctctatcacctttttagtaggattatttattaactctaaagagttccacaagcttttaacacacattatagcaacatcttcattaacgtctttaatatattttactgacagcggggtatttgcaatagcttgtttttgcacttccttactcgggtttttaatatatttaatattgttaccattattcttaacaataaataactctaattcctcatcaactttgtctatttcctgaatatattcaggattgtttctcaatctcaataatagttgatctctatccatttttatctccttattacatatattaatttcatactatattatttctatataaaacattatacttgatattactgacatattcactatgcttgattaataaatacaatatcccctagaaaataaaaaaatcgcaagcgactgtggttaagttccgtattgtgcttcgcactcttttcatatgtgtagatttttttcacgcatctgccatttctaatgtgagaaaaatctgcacattagaaatggcagctatgcacctataaaaagagtagctatgctacaatactgaactattctgcatataagaacattttatgaaggcgaataagatttctttttattctttttaaaataccaaaactattcaatcaaccttttttaagttacacacatattttactagaatataaattcctaaagaataaaaaacatagctgcagatatttcttttaaatattgaaaatctacagctatattttaaactatttgaacaacaaagcataattttccttatgaactaaatatacaaaaactcttaatctgtatatttttcaatttctcttttaacagaaaacaataaactatttagctcccaaacttcgccatcttctattaacttatttaaagttttttggaatctggctgcctctgtttccttacctagtgaaattaaagttaatagtaaattcattatatttgaaattaaatgtgatttaacctcaaacaatttttgagcatccttaatttcatctttgatttctaacatttcttcatctaatctaaatgctgcatctgcagatcttttaagtttttcctttaattgttctggtatatgttgcttatatttgtaattaagagaatgttcaatagttgcccagaaattcattgctaatgttcttatttgaaattcagccaaaatttcaactagtccttctgccatatttacaggatattttattatcatatgataacttctataaccactctctttaacattccttacataatccttctcataaagaatctgcatatctttacgttctcttaatatctgcactactgtgtctatatcatcaacaaactgacacattattcttatgcctgcaatatcctcaagttcatatctaatcctatctattggtatttcaaatttattagctttttctaacatacttgatacttcttttactcttcctgttacaaactctataggtgaatattcatttttttttctatattcttttctaattgattttaacttaactttcagttcatctactgcttgctcataaggcattaagaaaaccttccaatcattcattgccattatatcaccctttaatacattactatcatttctcaatttcatccttatctattatatcaaaaactttaaattaagtgtaattaataataaataaactatttaaaaaatattcatagactatttatgaatgcttttaatatgttataatcaatgtataatatagaattttattctagattgcatttttaatggggtgactgaaaatgagtgatacgagtatattaaatcatctttttgacagacagatagtctgtcctgtttgtaattcacattttaaagctaaaacagttaaatctaagtcaccacgagttatttctaaggattcagatttctttataagatactctgtagtaaatccgtatctttatgatgtattaatatgtaattcatgcggctacgctgcaatgaaatcagattttgaaaaactaaaatcacataaaaaagaacttgttttaagtaacgtaacaccaaaatggaaaccaagagaatatccatatatcttagatgaaaaattggcaattgagcgctataaattggctttattaaatgctatgcttattgatttgccaaatagtacaaaaggtatgctttctctaaaaattgcttggatgtataggttactggataatgatattcaagaaactttgtttttaaagcaagctctcgaaggattcaacaccgcttatatgactgagatttttcctatatatggcttacaaagagattctttaatgtatcttttgggagaattaaaccgaagattgggaaataatcaagatgcattacaatggtactctaaaactattgttaatacaaattcttcttataaaattaaagagatggctcgcgttggaaaagatttaattaaaactgccaacacataaaaatatatttttatttatcatttcaagggggaatataacatgggattttttaacaaaaacaataataaaaatactactatgacagaaactattgtatcaaatgtttctaacagtggggaaaacaatactaacgctagtcaaaaaaatttaactaacatcaatgatttaagagaaaaagctgttttaattgatagttctataaaaaacgcttcgtctactgcatcagaattagtatcttctgctgaagctcaaagcagagaaataagtaatgttaagaatatcttatcaggttttcgtgctaatatggaagacttagcaattaacattactaatgttcacattaaagtgttggatactgataaattggctgatacaggattaaatacaataggaaatttagatacatctctaaatgagcttgaagacgctttcacaatatcaacttcaacagtaaatgctttagtatcaaaacttgaatctgtaaacagtataactgattctataagccaaatcgcaagccaaacgaatcttctatcattaaacgcagctatagaggctgcaagagctggtgaagctggtaaaggcttttctgttgtcgcaggtgaagtcagaaaacttgcagaaaactcaaaacttgctgttcaaagtataactagtatacttgaagaaattaaaatagacatattaaaagcttctaatgcaatgaattctggtaattctgcattaacaactcaacataactcactgcaagaagctaaaactagtttttccgatattaaaacttctatagaagatgccactgaagaaattagcacttgcatagaaaatttgactactgcttctgaggcaaaagatactgttattaattcaattgataacataagcgttcttttcaaagaacatgaatctttatcaaaagaaattattacagatcttaatagccaagaagatgctattaaaaagatgagcaattcaatagaacatttatcatagattttaaaatttatttattaataaacaatagaaagctatctaatattttcaattagatagcttttattatttcaattatactataatttttactcttcaatagaaattatatagctacagttaaattcttttccttcttctaagaacattattccttctttatccttaaagtctccattaaaatcgccatagtcagcatgaccaaaccaaggttctatacatacaaatggagcgccatcaactggagcccatattcccatgtaaggaaatccatcaaactccacacttaaagacttattatgattctttgattttattgtaattttatttgattttaaatcatcaaatactaatgcatcatctttaaatatatcttttttaagttcaataatatcactattagttaaataatcttttttttcatgggtaaaatatgtattcttatcaaaacacataattgagctattctctctctcattaaacttaagataataatcctctaatatctctgttttttcaattggacacataaatgctggatgagctccaattgaaaaatagatttttttatcatccaagttgataactttataacttacctttacactattttctttaatagtataagtaacctggaaagaaaacttatatggatatacttcaagacttttatctgagaactttaactcaaaagtaatagattcattgctttgacttagcaatgtaaattgagaaattcttgctaatccatgagatggtaattcatattcctttccatcaactttatacttagaatcctttagcttccctattataggaaataaatgtggtgcgtggtatttccaatattccagattcccattccaaagatattcagtaccttccttcttacctgttatagagtgtagttcgcctccatgttcactagcagtaattttaattttttcattttctaaggaataaatcataaaacgtcactccaaatcttattataattatgtaaagaaatataacctacttattccagttatatttataataatatatacatacaattacctacttgcttattattcagattaattttagactccaacaaattttctatttatatttgttgaattaaatttcattctatatttatctgcatcataatatctttttaggatcaaaattcaaataatctgctgatgttaatatatattctactccatctaaatatccatttaatactttcccaagtagtattggaccatgcaaatgtccatatataactttttctactttgtattctttaatcattcgtgtaaattcagattcctcaaatttatcatttgtaggaggataatgaagcataacaattatcttttcaaatccactatttttcgcagcatctaacgaaagtttcaaccttatttgttctctggtatatattttttcatctttgctagtatatttatccccaccagggcacatccatcccctagtcccgcatatagcataatcttcataagtataaaaattattttggagaaacttagtattttcatacatcttatttaatttcgatatgctcccccaccaataatcatggtttcctttgcttataatctttttacctggtaattcatttatccagtccaaatcatatttactatcagtctcttttaaagaccaagatatatctccagctataagcaccatatctttttcagttatttttttaagccaattttcttttattttatcagaatgcgctttccacttatctccaaaaatgtccattggcttttcaacattaaaacctaagtgtaaatctgaaatagtataaagtgccatttttctcaccttccgtgtttcttctgtctataacctcttcttatccaaatcagtaagaaaagcaattacatgagctactgcttcatataattccgtaggaatttcatctccaacatctacattacacaataaatcagttagctctttattgtatactattggtacttcgttttgcgttgctttttctattattttatctgcaatatgccccattccagctgctgtaactactggtgcatcgctattaaattcatactttaatgctgcggctttcttcctctgattcatattcctgtacactcctaaccaatattttcaatagtgctaaaatgtacaattaaagctaaaattccttacgatctaaaagcattataattaagactcctttattgcacattaactgcgtattttaaatgaatacactaattattataccttaatatcgatagcagaaatagttaaatcgttaaagaaatttctacaacttactaagtccacaggcttttctttcatggatacacttatattaacaaatagcccaagtgttgataacccatctgctaatttagatttattattgtttaaaatagatgcaaaatgactttcacattttaaatttacatcaattctgttatctcttaatgtcaaatacccgtcaacctctcccaaattagctgttttaacactaacaaccattttagcattagttttatctattttcttaccatcttttctattatcttttattataagtttacatggatattcttgactatttgcatttataggaatatttaaataataatactcattgcttacggaattgaataccttaatatcatttatattattttttattaaatccattattttttcatatccagcatcctttaaatccacatgtgctattaagttcttaactatatctcttactccatctattttaaatttcatatctgcttttatagcttctttgctatctaaattacttcttaatagtaaatcctcattttttagatcaacaaagttttccttagatgatgttgctaattccttaggctgtatatttccacctttatcattagatactgtttcttcatagtgatcttttccttcaattctattattcaataatttattgaattctttatattcactatcagtaagtttaacttctctaccttcaatattacttaataatatttctaatttatttttatttgatgattctataagactttgtgcttgtgtcttgggttcactatcagttgtaatgctattacccattgtttcctttattagatcaactatttctttattatttaatttctcaactaacgaaggtggaagatttactttttgagtatttaaattattcttttcattatcagcaaacttttgagctatatttaattcactatcttcacttcctgctaatgtttttaatacatccagaacatttattttcctatttgaaggatcattctcattatacaacttcgatgctattgctttagttgtatctgtagtattcttcatcaggtcaatttctctatctattgttttatttttaactacagtctcaaagttattatttggtgattctataaaatttaatgactcattcatcttttttaatatttgctctattgatgaattccctttaaacaacttgttaaaactatctatactttcttccgaaaaatccaaattattttctataaatgtaagtatatcgtcttgtgacatattcttaaattcattcaggaacttggtaagcatctctttaacagcttgaccttcctcactatttccagatatatttttactttgaagatatgtttgaataaatgcatctatttcctttggatttgaacttatctttccattaaattgaattaatcctttaattaaattaatattatctctagttagaggaagattacgcttaaccatctgttttaaaatatcaatatcttcctttgaaaggccttctttatcgattatttcctgaaagctttcatcaccagttgatttttcatctacagaatcttctactagttttaattttaacttcccattttcaaatccgtttacttggaacttaactaacttaagatcatccaaattgatatttccctcaagctcagcaataaattgccatccatctgataacttgactgtaatatcttttccatctccctttgcaactactcttcctgtaaagcgttcccctacttcaaaagttaacttgctagaaattttttttgtatttatattatatccattatttatattccaaattcctggcatattatcttctcccctactaatttcattcgtactttcccgatcactctattatacttatcgtatgaacatagcataagttaactaaaaaataaaatgttattaattacaatttagatattcagcatgattaatctattataatattatccgagtacacacctattcgatataacattatagcatttatacttgcaaattttaaggttataaaaaataaggtgaagcttccgttttaaagaaccctcacctctatcattatcgtattaaattcacttaataatttatttgtattctttaacttcttcttctccgttaagtactctaattactccttgtgctaaagcaagcatttcatcttcacctggatagatcaccataggtgctataaagcctactcgttctcttattagattaaccataggctttccatatgccattcccccagttaaaattatagcgtcaacattaccgttaagtactgttgctgccgcacctatctcctttgaaacttgatatcccatagcatcgtgtaccatcttagcctttggatctccatctagtgcagcactttctacaaccctagcatcgtttgtgtcaagataagctacaaatccaccttttcctgttattttctttaagatttcttccaatgtatactttccgctaaaacacattctagccaaatcgcctgatggaactccaccacttctttctggtgaaaaagctccttcaccatcaagtgcattattaacatccactatttttccttttttatgtgcacctacagaaacaccgccacccatgtgtgctacgataacatttatatcttcataatttttagagttttctctagcgtatcttttagctactgccttttgatttagcgcatgaaaaatactcttcctaggaagctctggaacacctgacaatctagctatttcttccatttcatctactactactggatctactatgaatgcagatttaccaatagatttagaaatttcatttgctattatagcacctagattagatgcatgctctcctttaatactttcctttaaatccttcaacatgttatcatttacattatatgtgccacttaggattggttttaaaagcccccccctacctactactgcatctaattcctttatatctattttattatctttcaatatcttcaatataacttctgttctaaagttttgttgatcagagatatgtttaaattctcctatttcttctgaagaatgtcttatagtttctccaaatacttccttttcatcctcaaatacagatatttttgttgacgtagaacctgggtttattattaataatttatagctcacactttttcctcccttaagattttattttcaatattccaatatgacctgtaaaattaaattttatagtaattcaaaaatattaattgctactgccattaatgaaaattttgtagaaaatacaaatatgttggcgataatattatatactgtatattggattgttacaagaaataattactatataacttaaaccttttcatcaccttactattataacctgaaactatgtaaattaacaaatacttttttcatataattaggatattcattaagcctttaaataaaaatcacttgtgacttataaataattcacaagtgatttttattttacacttagtaacttaatatattggaataaagtatactatatattaataatatactttatactttatttttttgttaaatgctattaaaattatgcttatttctctacttatatcctctttctttatccaatgcctcatctctaatttcttctctcatgcctcgaagtgcttcttctcttctatcattcttctcttttaatgtttcttgcattttaggatcatcagttttttctatcatttcatctgcaagttcgcaattcaagatggttctatcaatgttgtattgaattctatctacattatcttttctgttatctggtttgtttttcataattgcatctctcctttgtttgaatattagaattacttatattcaagtaattttcattttttattatttacaagacaataatttattatgtacaaacatatgatacccgtaaaaaaatataaatactaatacatttattttccacgcattaatgaatttagtagtgcaatactattatagtcaggaggtgattatatgaaagctcaattagcgccacatgaagccatagaagttagagaactcataagccaagaaatgctaggaataaagaaaattaacgctagcatgaatatggtagatgataatgaactaaaaaactttatgaaagattccttagccgctaaaaaaactgctctaaaaaatatacaatctgtattatcataagtaaatttattacatatagaaaggagagaaatttaaatggatcaaaagaagaataactcattatcagaaaaagatattgctcttgatttaatgacaagttcaaaagcaacaataacaactttagcaaaagtattaacagaaacaacaaactctgaactacgcgatacacttaaaggtcaattaactgcttgtgttaattcccactatagattatcagacatagcagtaaataaaggttggtataatgctaatcaagatcctcaacaacaacttcaaacagaattatcatctataggttcgataactcaataagattacttaattatattcatgattttaatttagcttggaggtgaaattatgtcaaataataataataataataatagcaataatagcggattagctccacacgaaatgattgaactaagagaattgatggatactaatattataggtgctaagaaaatacaagcaagcatggctatggtagatgatggtgaattaaaatctttcatggaaaaatgcttagatagtaaaaaagaaaacataaattcaatgcaagattttattgaaaataaattaaatatgcaataaaaataggaggtagttaatatgtcttttttagataagttactaggaactgatgattcaactctagcagctagagatattgctcaagacatgcttaaagattctaaatttgctgtgacttctttagctgcagcagctgctgaagcagtaaatccagaattaagagaactgttaagagggcaattagataaagctgtagctgagcattttgaattatctgatatagttgtagacaagggttggtattcagctaaagaggcacctatggaacaacttagaaacgagtacgaaaactctcaaaatttgagctaacaaaatatatagtgcattttttgtgtcaggcaagaagataaatgctgttctattgaatacaatattaatctgacttgccgatacatcatcataaaatattattaatatgtttgtatgtattataaatgagactgctatatatatgatttatacttatttgacaacaatatttgaaagcttttattagtattcaaaaaaataaaaagttgttaactaaaagtctttataccttcaattaacaacatattttatataataaaattatttaatttctatcttattatagtttttctttcctcttttaattaatacagcaccatcttggaagtcttcttcagttaagattctattaactccctcaactttgactccattgatagacaagccgccttgctcaattaatcttctaccttcttttttagatggaataattttagtacttgccattacatctaatataggtaaaccaatttcttctttggctatagtaacagttggaacatttgacatatcagctccaccagcaaataatgctgttgctgcttcttctgccttcttagcttcttcttctccatgaacaagtttagttatctcatacgcaagaactttcttagctccatttatctcagctccttcaagcgcacctaatctcctcacttcatccattggcaagaatgttaataatgccaagcatttttcaacatctgcatcatctacatttctccaatattgataaaaatcatatggtgaagtttttgctggatctaaccataacgcgcctccaacagtcttacccattttttgtccttgactatttgtaagtaaagtacaagtcatagccatagcttccccttgagcttttcttcttacaagttcaactccagctatcatattagaccattgatcatctccgccaagctgcattttacagttatatttttggtttaattcataaaaatcatatccttgcattaacatatagttaaattctaagaatgataatcctttttctaatctttgtttaaagcattctgctgttaacattctgtttacagagaagtgaacccctacttctcttaagaaatcaacataattaagatttaaaagccaatcagcattgtttgctaatattgccttaccatcagaaaaatctataaatctctccatttgtttcttaatagaatctacgttatgctgaatatcttctttagtaagcatttttctcatgtcagttttaccacttggatctccaaccatagcagttccaccaccaattaaagctatcggtctatgtcccgctctttgcatatgagccataaacatcattgctataaagtgtcctacatgtaagctatctgccgtaggatcaaagcctatatagaaagttattttttcattctccaataattttcttgtttcttcttcatgtgtaaattgttttatgtatcctctctctaatagctcatctaatacatttgccattatagtacctcctaaaattttcttatttgagttaatataaactaattgcagattacaagtccagattataaaaactatacgtatttctcaaaaaatatattttagcttcataaatttattaaacttcttataataacttttcgttacctaagtttttaacttatactgcagttcaggttaataaagtaagattattctaaatttcatattagaattacttattatagtatatcctcaaccttaaattttggcaataattcatattttatatacacttatttagatttaaactccatgtcatttaatttcaatgcccggcaatatcaccttgaaactatgttctgctcgtgaattaataaatttaactctgcctttccctttaaaagaatttttaataattgtaaatcctcttccgctatttaaaaatcttcttttctcatctaaagaaattagtttttcatataaccaaatatttcttttattataattagttctttgtccttttacattttcatctatgaactcaccaggacttgaaataataatcttatttctatctataattatttcgattattttattcaaatcaaagtactccctatatagaactgcattctttattgcttcaattattgcttgcattggataattctttggtaatatctcttttattttttcttctgcactatctatcatagataaaagatttccttgaattatgtgcaattctccattagttttttctaacttattaatgatttttatcatattgttaggaatatatatataattcttatcagaaaatacaagcaatcctccatatgtgcatttaagaggtgcgccttctttatgttcaaaggctattcctgcacttaacagtaaaaatctcttattttcttcattaatttctatgccttttttactgaaatacctattaactaattccatatttaaaatatcaatgctactttttataagagggcaagtttcaatagttaaactcagattttcctccaatagcacaatcaattcttgctttctcattacatctgtagtagaacctctccttatataaaaagctccattatctctaacttgatatggcttttgtcccccatcataaatcgatattacgcctattttcttatttttaatctctacgaaatcaacttctattggtattggaggctcacatcttgtcgttattatttgctgtatctgttcttctttaaacatgtcattttcttgtatgcctataatattcttggttttatcttcaactccaacaattatatatcctcttcccccacttgaattagctattgcacatatatctttagttaattctttcttacctgtctcacagaaaagctctagtttcaatttaaaatctaactttgttccttcttctctttttatcaaagatagtaactttttactatccataatataccctccttatatatttattaataaataccacaagttacaaaatattttactggatactttaaagatgtatataaatttagccaataaccactttttaatttaataatatttctttacttatccactataaaatattattagcctaaataataaaaaagcattcttattaatataaataagtttgctttataatattattattagattttaaatatatttccactcagaactctatttttaccactttttttagctttatataataaatcatcagccttgcttataagttcatttaagtctgtaccatttaaaggaaaaaatgaaattccaaaacttgctgttatagactcatctctaccgttaaaatttattttactaccttcaattgtacgtcgtatagcttcaattttgctatacacattatcctcactagtaaaatccgaaatatataggataaattcttcccctccatatctggcgaagatatcatttttgtctattccacacttaataatattagctgtgttaaccaaaatcttatcaccaaattgatgaccatatgtatcatttaccttcttaaaatcatctatatctatcatcactatggcaaatttatcgtttaattttctattctccttcttttctaagaattcaaaaaagtatttcctattatatattccaagtagagggtctctttgatttattttttctaattctttatatagcaaagaattttctattgcaattgcaatctggtttgcaattgatctaaggaaaagtttaagctctatgttcataaatttatagagattatgttctactactatatatccaataaatttttctctcagctttattggcgatcccataattgaatgtatgtctattttatgttctccagtctgcttcaaaggctttctggaattaactaagaattcctcgcccttgtttatatgcacaaactccttagaagttagatttatattcatattctcaatattgcttgccttaactattaactcaccattttctatcataaatatagttgaatatgtaactcctagtatcccaagaatcatgtcattaattagagatattaaattatcactgctaaaaaatgtatttatatatttacttacttctattatattagataaagaatctatgctcttttctagtcttacgtttttctcatttagttcttgtatatgttgttctgaaaacttctgatatgtttcatattctatctttagcgatttatacagcttctcataatcctgcatttgtcccaccatcctctaatcatacgaactccatgattatataacaacttaaatttaccattattttatacttaatacaattatactacaagtaataaaataattgaatacaattacttcaagctgtttgtaaattttactatatctttaaattgcatatgccagcatgtacacgccacaaaaaattataataaggttaattataattagttctttttataacgatttttactatattcttcatctctcttcaattactaggaaaattttcatgaattgcatctttcaatttaggataaactaatattacaaaattaattttacgaggagacaaaataatgagatttatacaatggcttttaggtgtatttatatttttattgatatgtacactatttatacaatttggtaattcggtattaaatattgtattacttatttcactaattatatttggtataagatttttaattcaaaagtataccaatcgttattagtttttagaagttcaacttctaacattagatttttatatacatatcaaaactactatcgttatgtatattttataaattaataaatcctaaaatatactttaggatttattaatttaattactcttaatttattttctaatagttattttcccatggcttagaacttaaataatctataaattcatctcttaattcatctttctttaaggcaaattctattgttgcttgcaagaatccaagtttatctcccacgtcatatcttttaccttcaaagttatatgcatacatagcctcagttccaattaaagttttcaatgcgtctgttaattgaatctctccaccttttcctggcttagtattttctaatatattaaatatttctggtgttataatatatcttccaagtatagcaacattacttggcgcttcttcggtattaggcttttcaactaaatcttttaccttataaactctatcttcaacatgtattccatctactataccgtacttggaaacattttctttagctactgtttgaactcctaggatagtagttttatattcgctataacagtctattaattgttttaagcatggtttttcgctatcaacaatatcatcacctagtaaaacagcaaatggttcatttccaacaaaagtttttgcacaatgaattgcatgacctaatcctcttggttctttttgtcttatataatgtatatcaaccatatcagatatatctcttactaattcaagtaattctgattttccagacttctctaattctaattctaattctactgatttatcaaaatgatcttctatagattttttgtttctacctgtaatgattaagatttcttcaattccagaagcgattgcttcttcaactatgtattgaattgttggtttatcaactactggaagcatctcctttggttgtgccttagttgcaggtaaaaatcttgttccaagacctgcggctggtataatagctttttttactttcacgatatatcatcctctcatcttattattggtaatttaaatatattaagccataataaacaattctaattaattttgcccaacacattttttaagtattcctattttatatatactttttacatatttatgaaataatagtttaaatgtattcaacaacttaatacatttaaactaaaatctttgctaattctctttcatatctaatgttttaaaatctgttaatggaaattttactggcattcctgtttttcttgatttatatgctgcaagtattatagacattgccttcttaccttcttctcctgatactagtggatctctattttcatttatagcatctattacatccttaaataacggtgtgtgaccttccccatatacgttgtctattttaacatttacagacttcttaaccgcttcttcatcttcgccttcaaatctccatgtttcaagctcattaactgcaagaccaccaattgatactgctcctgtttcgccaaatatacttaatgtttcttctagatttttaggataaacacaagctgatccctcaactattccaatagcaccatttttgaatcttattattacagccccaaaatcttcagcttcaatatctcttagataagtatcacattcagcataaactctttcgatttctccacccatcatccattgaagtaaatctatattatgtatacactgattcataagtgtaccaccatctaatgcccaagttcctctccaaggtgcttgttcataatatcccatattcctattccaaagtattctagctgtaccattaactaactttccaaactttttgtcttctatagcttctcttaatttctgtataggcttattaaacctattttgatgacaaactccaagcttaacatcgttttcttttgccaccttaatcatttcattagcatcttcaatggacatagccattggcttttctactaatgcactagccccctttttcatgctatgaatagcaatttcagcatgataaccactttctgttgctattgtaaccacatctatatcttctttttctaacatttctttataatctgtatagacatgcacagaatcttcagctgctccagttttttctatgtattcagatttctttgcttccgctttttctaaaaccacatcacaagtcgctacaagttccgcttcttctacatttttagctaatgcttcaacatgcttatatgagattcttccgcaaccaataatagcaaattttaattttttcatattaatctacctctctcaaattaaatacttttagtcaaattcaatagttcataatttcctttaaagttagttttactaatgcatttagaacaatattttaaatacatacctaaaatcagaagttaagacactaattttaaataatagtattttaacttcattagctatcgaaacgattttctttgattttttaatttcgaattctgtctgagataattacaaatctatatttttctttgattaaatgcattttactattgttttaagtattatataaatatctaaaaatatattatttttatttatatattctagatttaatgcaagtttatctggcataattgtgtttatgtaaaaatcatcaggattttctgcttctccaagtaaatcattttcatctctatatctaattgatgccaaatctgttatccctggtttaacttctaaaacccttctctgttcctcattatacatctttacatatctaggaacttctggtctcggccctactaggctcatgtcccctttaaatacatttattaattgtggaagttcatcaagtttatattttcttaagaaagcacctattttagtaattctgctatcattccctacagtaatttgtcttcctaacttttctgcatccacaaccatagttctaaactttaaaatctcaaattctttatttttttcaccaattcttatttgtttaaaaaatacaggtccatcagaatctgtttttattctaatggcaataactatcaaaatcggacttaaaactataagtcctaaagtagaacatatcaaatcaaatattcttttaactactttattgaatgtattcatctatttactcctaattcatttatttcagaacatataatattatattaactattttacaactttttagtcaattcaactcatattattgaatttcttcataaatttttaagttattttagtgcatctaaaaatttctctgcaagcccgcgataagtatgattttccaacacataatccttaccattttggcccaagttatttttttcatattcgcttaagtttctaatatccataactgctttcacaacagcatctggatcttctgctggtaccgtaataccacaatttgaatccttcactggatcattcgaagcctcaactgcatatattactggtcttgctgccatcatatagtcaaataatttatttggacttacaccataattaaataaattttgcttttttagtcctatataacatatgtctaataatcttagtacattatccatattatctttaagtacaggatctagaaattcaacattcgttacattactagttttagcatattgtattaattcatttttcacgtttccatttccaactaatacatactttattttttcatctgtagttttctttgcagcatcaatcatcgtatctaatacattagctggcgagtgatttcctgtatatccaactaagaaataaccttcatcttttagttcttgtaatctttcaatagttttttccataggagcattttttttctctccaacaattattccatttggaacatgaacataattatccgcactaaatcccctatctttcatatgcctatctgcattaggtaaaattgaaataattttatcacaatttttgaaagcaaaatcctctgctctttgaagcataactatagctggattattcttagaataccctcctatttccattggcgttaaaggccataagtcatgtatctcaaaaaacagtttagcattactcctctttgcaatcctatgagctggatatatatctaaaggataagtcgaagatgctattactgcatctggtctatatttatcggcaagtttcttataattcattctcaatttgaacatgaatgttgatatatttttaattcttccaactccatttccctgatattctggagttttaacccatacatatgtaattccatctataatttcttcttcgaaatcctcttttatttgtgggtttttctttcgtaaatgtgaaaaatcagcaccaagtatgattactttatgtcccatatcaacccattctcgccccatataataaggtctaaattccattccatgataatcagaccctgcgtaatgatttataagtaagatattcatcttaattgctccttttttgcattataatgttaattaacgctatagattataacataagtgaagctcaaaatctatgattttgctaactgaacttatccagcaagtgcatgcgagtcggatttcctttaaaaaaagaactttaaatctaccccttaacattatattaataccttcgacttcattatccaattatgattttgctagtctaacttatctataaaatgaaaattatcaacttttctataaattcctctcaattaaaaatcctcatctttacttttaattttattttcaaactatcattttataagacttaattacttaactatataacttataaatatttctcttaaacctaaaatcgcactaataattcttttttacttcacagaatataaactagcatctataatgttccattcattacagatgctagttttatgataatctatttattaatattgctttcatttatattattagcaccaacactacttgtagcactactattaacacttcttgtattattactattgttctctttgttcgttttttctttgcttccagcataatcataatctagttctgagtctggattaagcaataatccatcatgtcctaatttatactctttcccatttttcccaagaacaattgcatccttttgcatagttccatctttgtaaaaataataccaccccttttcagtcttcaaccaccctatagctttttcatcatttttataataataccagtcaccatttccttttctccatgatgaatcagattctctataatccttttcttgagtggtcttaatattagattcattatcttttgaagtattctcttttgaaatctcctcttttggtataatatcttttggcatttgctcaggctgtttgacttcttcagtatttaatttagacttattattagaatcatcatattcattaatatttttataagtatttttcaatgttaatttatcattatcacttcttaacttgttggtgttatcttgaagatattgtgataaatcatagactacatatctattttttatttttttattttctttatcatgatattcttccttaactaatatattttctgaatcaaccatccgaatactgattttactatcatcaccatataatttagaaatttcaataagcatatcaaatccatttttctcaagcttagctaaataaattttattaacacttttctcatcatcttttttaattagtatataatccttgtaaaaatcatcataaccatataggcttatattgtctaatctctctgcaactttattaactatatcatattgggtaatgttaatactatcttgatatttatcattgcaatccaaacctatatatgcctgtccctcaaaacaatatacatagctatttttaaatttttcttcctgacttactagatttttattaagaacttttatatcatcatatttttctatagtaaaattaccttcattaatctgtatttgttttactacattattttgacacattgcatagaagtcttttgatatatcatcataaaatatgccacttataacatcttcactattgctgttacattcaaactcgtatttatcattgctattaatgttatataatatgtactttttattttgctccttatcttcagaacgtaaataatagtcactatttccagaaacagaataccatcttgactgaaatacattatcttcatcagaaagtagtttatattcctttccagactgccaattaaaataaccattccctccaaaaattttatcaccataaatatttaattctccatttaaataattatctggcagctttactccacattctttactacttccatctttatttaaaataaagatattattatcatataattttttattaatataatcatattttattaagtatacacttccattattgtagcccaatggaatctcctcataatcatcattaatattattttctatctctatgatactctttatattattaatacttacatctttatttaatacttcaatctcctcatggcctttctttatgtactcaccataatacatgcaagaaaatataactgctaataaagctataaaactaattatctttttcatctttcccctcccagcacaatacacatataaataaaatagtaatataaaataaatcagagcagccttataattactttctaagctaattcaatagaaataattataaggcaaacttattacataattgttaaatcaaaaacttaattgtaatacagatattatttaatccaagcaccatctgtacctaaaacatatttactatcgtggtctattatagttgtatttttttgcattacaccatctttattgaaataataccacttaccattatcttgaatccatcctttctctttatccccctctgaattcatatgataccaatttccatctacttgtttccactcatacttatcatcatcaaatgtaatgtctggtgtacttttattagttaatgctccatctgcatttaatatacaatcattacctttctcacttttaactgttatacttttttgcatttttccatcatgatcaaaatggtagtataatccattatctagttgccagctgtcaactattttaattccttggtccccaaaataataataccaatcattgcctatctttttccactgtttatgactctctttataagcttcagaactatcgtaagtaacttcttctccattaacaagatcatatccatgctcacctacaactacgcccttttcattgagctttacttctttgccagtaagatctttaactgttgtacttttttgcatttcacctttttcattataataatatattttaccatctacatcacgaacccatcctgtttctttatctgaatcattacagtagtaaattttcccatacttaattttaatatgtgctccatatttatttaattcttccttcgacttatcagttatattatcgctaacttgagttccgtcttcatcaagcgctattccattttcatcaaatttgaaacttttgtcatttatctttaaagttgtatttttttgcatttcgccattctcattaaaatagtaccatttcccactaatattaatccaacctgtttctttttgacctaatccattataaaagtatatcttaccattctctgtaatcattcctgtttgagttttcacttctgcatttgctgatgtcatccccactgctaaaatacttccacaaactaaaactgctgcaattagttgatttaatacttttttcttcattaatttattcctcctcagataataaatatttaatttgtacacttggtacatcacctataataaacccatttcatatactttcaatgctttttacatttttgtaattttcttgtagtattttattaatagttattacttatttaacacttctgtaacatttttgtaatactttgaaatgatttttatatacctaaaaggatgctatagatatctaagttaagaattagatttatagccggaataaatagaaaaatatttcatctttttttatttcatattttaaagaaaacatattcttttgagctaattcattgcataaatatagtcctaatccagaacttgaaatactttcttctatatttccatcaaattcattatatttaataaaaggttccaatagatttttagaaatattctcaggtattaaagaaattttattttttatttcaaatataaaatcatctttatttttgtcaggtttactaagagaaatatatatttcttttccttttgaatatttcaatgcattatcaattaaatttaaaattatatgctcaatatcttcttttacagttaatacagcaatttcatctatattaataataaactctttatttaatcgtctacacctatcaattaatctatcacatatttctgcaattaatatgttaagtttaacctcttgctttatatccttttttctaacgccacatcgtgaaatttcaagaagcttttgtataagttcttttaattttccacattccatcattattctattaacagctctttttttgaattcttcatccatactatttaaatcttcttcttttaatatttgaacatatccgtatattgaagtaactggagtcttaagctcatgcgttgcattattaaaaaattctttcgatatattttctaattttttcttttcttcaatcatttcgttaaaagacttagtaacttgtccaatttcatccttagatttcgctgaaattctatcaacttcttttccttctccatattttttcatttgtacactaagcttttttaacgggcttattattttatttataaaataatttaatgctcctattattactattaaaagaacaatttgagctcctataatattggtcattatatttttaatactatcataataatcattataacttttttgtataactaaactcgaataatattttccattaagatatatagggtaaacatatgtacaaaccaatccatttttaacattaaatattattaccgagctttttccttttgaattttctaatacattattaatactattttcaaataagatactacctttataatctattaggttattattataatcatacagtcccacatagcaatcataattgttattaacttcatacacagttttattttttactttaagatcatcttcaataaccatagcactatattttaaagtgcttgtactgaactttctaatattctccatatcatctttaatattattctttatatttgcataataagtattatatatgaaaatacttaacccaaaattaaatataataagagcaaatacaattcctatcattatttttccttttagtgttttcagcatattctccacttcctaaccttatgcttttatcttattacataccctacaccaaaaactgtttccactattgaattttccttatcatcaccaagatttgcccttaaccttcttatatgaacatcaacagttctagtatccccgtaataatcatatccccaaacctcatttaaaagctgctgtctattaaagacaattcctttattcttatataaatagctcaacaaatcgaattcttttctttttagcattatctctttcccatctttaattaccgttcttgtatcaaaattaatagtgaactcatcttttttattcttatctccatcgatatcatctaaatcattttctgaaacagtactagctatattctcatgttcattattaaaaatatttttacttacccttctaaaaatagcattaattcttgctgtaacttctcttatttcaaaaggctttgttatgtaatcatcggcacctatttccattcccaatattttatcaattacatcatcccttgcagtaagcataactatgtaacttttttggctcatgatcttacataattcaaaaccacttatgtctggaagcattatatctaacaaaaccaaatgaggttcaaattcttcaaaaatttttaacgcactttccccattgtatgcccccctaacttcaaaattttcctttgaaagagcaaattttaaagtatcgttaattgaaaattcatcttctactactagtatcttcttttttaacatattacgcctccaaataataattatatatttcaactcaaatactatccattacattttagagtattacttcatttaattccaattatatcataatcataaacattaagaatggctaatccagttataaggctagtcattccttattgtatctatgataaatctgctttataacgaattcagctcttactggaagcatttgcgtaagtaaactgttgatacctgtaggatacatagatatgcttttattatagagagattacacagatattggttgagttaaaaagaagccatgtataatgatatgatactgaatagatagaagctatgaataacgtttagaactttatagctggaagtgattccaataaaattatgaatttatcagaaaaatttaatctaacagaaactcatacttctgttttcggaaattgagataattcttcaattatcacttgaatcatcttaaataaaactttctagcacactctcctccgtaaatgatctataattaatcatataaaaaagttctgataaaaaataaatcagaactttttaattgattttattggaccgctctaattccatgtgcaaattttctgaaattactatctgcacaaaaattttcagtccaaagtaaacggcatctatcacggaatttttgtttttcttcctctgatatttccgccatatatttaattttatttccaagctcctcaggatcgaaatctttatccaataacaatccagtttcgccctctttaacaatctcagccgtaccgcctacattagtcgcaattgttggaattgaaaaagaacatgcttccatgatactaaccggtaatccttctgagctgcttgtgtttatgaacaaatcgactgattcatttttataatattccattaactcggaatttttaacactcccaggaaaatttgtctccataaaatcaagattttctcttgaatactccttaattggatccaaaccatctcctgctccaaaatgtgtccattttagatttaatcccgaatctttcaatgttgccagtgactttgccaataaatctatacgctttactggtgaaacatggcagcaactcacaattctatatgttgagtcttttgatccttgcgaagttccataatcttttgtcccaagatatgcagttttaattttatctgagtaatctggataaagcttctttagataattacttccatcgtcagaacatggatataccgcgtctaaatttcttaggaaataatatctaagtggtatataattcatcgagttttcattagcataaagatcatatctatgtgttctacttactactcttgtaatctttttaccataaagttctttgagttttattgccacaaaagcaatatcatataaccaataactatataaagttatcccgctatactcatccatattatattttttaatgatttccaaaacttcttttaaaacactgtttgcttttgctgtaaaatatgttaaataagctttcttttttatggaaccactaatagcattgcgttcttctttatctacacatccattataattataaaatggaaatagctttacagcactaataggtaaactatgctttatttttgaagccttaattttatgtacttcaaagttactaggaatacttcttgtttgtatcgcatcatcagctacactagttgctatcactattactttttcaaaagcttcagaaagcatttttatttcgccttctataaattcttctcctttatcaaaaggaaaaactttagttaaaagtactaaacagtttttcatctttttccctccagagttataatcagtataagaataacatatgaaatacttcatttcaacaatatgaatataagcttttactttataatattacccatattatttcatttatgaattttatatgataaaataacgttatctgatgtctagtcgctatagcacttactctttatgtgaaaaccttctttcaaaagtcagctgagtgattatatagcaataagccaagtactcacagggagatggcgaaggacagaacataaaaactttaaatcgaaatcttatgtttctaaaatataaacttttgaaattcgcttttgagtggtttgcttagacgagtcacactaaatcaatttttaattctgcgtaagtgtaatatcattcgcatacacctagacattgtggtgattattttttataagtttaactaatattcagattgagataattctaatctcaaataaacttcactttatatttatttatacgtaaatataaataattcacaaataaatacctaaaatttaaggaggcctattatatgaaagtattaactgttataggtgcaagaccacagttcattaaagccgcgacagtatctaataaaattagaagaaatggaaacagtgaaattttagtacacacaggacagcattatgataataatatgtctgacatattctttgaagagcttggaattccaaagcccgattataatttaaacattggttcatctaatcatggacatcaaactggcagcatgttaatatcccttgaagaaatatacttaaaagaaaagccagatatggttttagtttatggagatacaaattcaactcttgcaggtagtctatgcgcaagcaaattattaattcctgtagcgcacgttgaagctggtcttagaagtttcaataaggctatgcctgaagagcaaaatagaatattaacagaccatatatccgatttacttttcacacctactttaactgctttaaataacttaaaagatgaaaatattacaaaaggtgttcataatgtcggcgatgtaatgtatgatgcaataaatctctttaaagaaagagctaaagataaatcaacaatacttaacaaacttgatttagcaccaaatagttatatactttcaacaatacatcgtgctgaaaacactaacagtattgaaagattatcttcaatcattactgccttaaataactctggcaagagaatcatacttccactacatcctagaacaaagaaatttattgaaacgtatgatttgcatgttggggaaaatataagaattattgatcccgtaggatatttagatatgatttctcttcaagaaaattctcaaaagatagttaccgacagcggtggagttcaaaaagaagcatacttcttaaagaaaccatgtataactatgagagatgaaactgaatgggttgaaactgtaactaacggttggaacgttatagttggaagcaattctgataagataatggaggctatagaaagcttcaatccaataggaactcctgcttctgcatttggaaatggagatagttcttcaataattacagaaattattgaaaaatatttaggataaggataaatcaatatattttaaacatctgaaatataaaactttaacaactaaaaataagcaaaaaaatggaaggtaatccttccattttttatttaataatatattaatatctgaattatattacattttaacttataaacgctcgtgctctctattatcctatcctatattccttcattgaagatgatgatgttggtttatactcatcactttcctttttgtaaacttgtatgcatgctactgcaaaccccatgagcatccaatatgaaaatacatacgttatagaactaggtccaaaacttgctggtgcaaacgctataagcccagttgcagctgcaaaacacattggactctttttctttattccaataatcatattttgaattaacaagtataaatagtatataccataaagcgctagccctggtaaaccgaagtctccaagaatttctattggataacagtgcgggctatatatatttcctgtatttccttgatttttaatatattgttcaacatttcctactccatagcctagataatgtttctcttttattgttcctcttaatacatcgcttactattgtccatctaacattaagagatccatctccgccttcttgaatttcttgctcccctagagcatcaagcttatctgcaagaccatttttcttctgctcctgaccagattctgtttgtgcaatattcattatcatataactatatttaaaggccacaaaaagagaaatcactaaaattaatgggcatactatcccctttaatcctatcctttttatatttattacagaataaattagataaactataactccaaatgcagcagccacaaaacctgttcttgatgttgttattgaaatcaacgaaaaagcaataattgaagcaattatgcaaactactttaaaaaatatgttctcaaatttatatattgcataaaagccaattggtaataatattgcaagagtagccgctaggttattaggattaaatgaaaaggctataggtcttgcatttattaaattttgttggtcttttggtaaaaactcaataaaagcgtcagcataatgtttaactggaagctgtgttccaagaataacttctacaaaaccaattaatattataagtaaaattagcgatgataatatagtaattgtttttttaattctttctctattaatgttatataccatcatgtttacaataaacgcaaacatcatcaagtagatagctatatactttattgacaagcttttatttaacgaccatattatactaacacacatatatataaaccaaagtacatatattgctaatacttttctatccaagtccattaaaatctgtctgtctttaaatattctaaacaatgacataagtgtaaatatgcccaaaactatatgaaataaatatacactttgcactcttggtacatacaatgtatagtcataaaatgcagaaattaaaagtagtgtatagaacatattatataaatctttatctttaagaataaaaactactaatattactactgtcaatatgtacattatagatactatataacttccatttgctattcctaaaaatccactaatagcaaatataatagctaaaaatatatttctaattacatcttctctcgtcattattactccttatccgcattttctgcagccacttcatcttcgtttttataatgatatgttggaactatcttttgcatttgatgcttaatctctgatatatcgctaagctccaataacttttgtaattgctccagcttaattgttaagctattcatatcttcaaatgttggtttacctacatatattttattgtgaaccgtattttctaagccttcttcactcattaaaagttcttcgtatagcttttctcctggtctaagacctgtaactacaatttttatatctctattgggttcaagccctgaaagccttattaaatcacatgccaagtcataaattttaactggttttcccatatctaatacaaaaacttctccgcctcttgcaaaagcaccggcttgaagcactaactgcgcagcttctggaattagcataaagtatctaataatctttttatgagttacagttacagggccaccattagcaatttgtcttttgaacaatggtattactgatccattacttccaagcacatttccaaatctaaccgcaacaaattctgtcctagactgcttatccatggcttgaatgatcatttcacataatctttttgttgctcccataatattagttgggttaaccgctttatctgttgaaatcataacaaatctttctacgttagcctcacttgcttctaatgctaaattcaaagttccaaaaacattgttttttatagcctctttaggactatcttccattaaaggcacatgcttatgtgctgctgcatggaataccacatttactctatattttgtaaatatttcatgaagtctctttttatccctaactgaacctattaatacagtaagattcatgtctggaaactcttctctaagttcattttgtatatcatatacattgttttcataaatatcaaatattataagtcttttaggattatatacagaaatttgtctgcaaagttccgaacctattgatcctccccctccagttactaatatagtctttccttctatataatctgaaatccctttattatcaagttgaataggatctcttccaagcaaatcttctaagtcaacatcttttattctactaactgtagcgtctccacttagtatttcgtacattccaggtattatttgaagtttacaatttgtattcttacaaatttcaattatttccgccttatttttcgcatcaagagatggaatcgcaattaatattaaatctatttcctgatctccaactatataaggtatatcgtatctgtttccttctatttttacacctgatattctttttccaagcttacttttatcatcatctataagaactatcggattatactttagttctcttcttgccatcatttcattaataagcatagttccagccgagccagccccgactatcattactcttctttggtctgatgagtatttaaatggtatgtacaaaagagttcttctatataccctatacaatattctatatcctaatacaaagaaaatacttaaaagtattccgacaaccgaaacatttaacggaattgtattacctagaattctagtataccctattgatattattcctgctaaaatatttccaccaacacctaacaaaaactcgtcagtaccagttaaatgccatagactttcatacattttaaacaagtaaaaacatactaaataaattaaacttaacgctatacaatcatgagtgtatattttcgcaattaatgtaaaatctccactattggttatatttattgagaaaagatatgccatattaaccataaacatatcgattatcataactataaaagtcttccaattcttcactatacttcccctcctacttcagagattctcactaaaatgtcctaatttaaactattatcttactttatctaaaacttttattaataatttaggacaagacagcattcccttacattgaatagaatatctaatattattcttatccaacttttgcattttataattctttaaatattttcttacatcctctttatttaaaaacttaaaaagttcctcatggaaatttgaatccttacctaataccgaaaaaacatgtgatattgaataaggtatcttaaattcaactaaaaaactttttatcttctttagactttcatcacattttatatcatttaataggtcaatatatgaataatagcaatccaaatgcttcaatgatacattttgagtcacagaatttccccatataacataaaaagccaatacttcatttacgcttataactttttttgcatataacaatgcctttacaacaaagaccatatcttctccatattttcttttagtatcaaataaaagattattatcttgtataatggaagatttatatatagcacttctcattcctattgttatatcatcttttaactgcataagagcagcttcttttccgctaatgaactcatttaaatagttagttctattttggactagtacatttcctttagcgtcaacctcactataatcacaaaaaactatctcacatttactttcttgggctttttcatacatacgctcaacaaatttatgatcaatataatcatctgaatctaaaaaagttatatactctccactagcttcttttattcctctgtttcttgccgcactaacacccgaatttttttgagttatgattttataatttatacttgaattttcaagtaatcctcttgctatatcgatacttttatcctttgatccatcatctataagtaaaagttcaaaatctttgcaagtttgattcataacagatttaatacttctttcaatacattcttctacattataaacaggagtaatgatagatacttttaccaaaactattcgctccttttatttaattatattcagaaaacaataagtcagcatactggcctatttaatgccataacttactataatattggactaatagacattatgaacatatatattcttttgttttaaagaatatatatgttaaaattatcatttttcacatcaattgtggatatcccaataacaaactatacttagcccatgaaatatattccaaccagaaatgagtgatatacttttatatttaaatactgtaccgtcaaataactttaaacttttcaacactacttgaattatactagtattgatgcccatatgcaatattaagccattttcttaagtaatttttcattttcattcattatagctaagtaaaaatactctcatttagagaaatagttttactactataaataaatctacattcttttataattaaaacgaacatgcctattgggcattttttaactttttaattattctggcatgccacactctgtcttcttctttcggaagcgtcatataatcgccatacaattgtgttaaaacagcatcataattcctaggcgcattaaaataatctccttcgaattcaacttttattaaatcaaaaaagtcctcttttttatatatgtaatgactccatactgtatccaacccatatcccatatattctgaatttttatcattccatttaactaaaagatcaaataacttttgtcttctttttgttgtaaaaatgcttgatacaatattataaacaaaatatgtaattttattttttaatgtaagcttttcaggtttttctctaattcttatgaaacttcttaatacaaaattgcttatttttctttgaatattgtatacccatctttttttaggaagactatcataaggtataatatctataaataaaccattatgcatcttttcattttctgcaatcttatcttcaataaaaagtgtattattatatcttattttgcatggaacttgatagatatcataattaggatcattgtcgtgagtctgcaaaaacaaatgatcaggtaattcatttttaactacacttaaaaatttattataatcttctctaagcattccaatatcaatatcgtcatcccatggtataaatcctttatgtctaaccgctcctataagcgttccagcatctaaaaaatatctaatattatgcttgtcacaaattttttttacatcttttaaaatgcttgccattattaactgcgcatctcttagccctaagtcttcataatttgaataattagtattattgttcatctttttctcctttaatacatatctaccttttattatatcaatgtagtcataaaactcaataatacatattaaatattgacttttaattttctattacaatacctgctacagattattaattctaaattatgccttaatatgttataatttattacagcttaaccatctatagagcaaattttaaccttagtaaaagattggagaatatattatggaaaatactaaagatttaattagtgttattgtgcctgtttataatgttgagaaatatttacctcaatgtatatatagcattttaaatcaaactgaaaagaatcttgaaattattttagttgatgatggttcattggataattccggaaagatatgtgatgaattctctaaaaaggatgatagaatagttgttatacataagaaaaataatggtctaagttctgctagaaatgctggtcttgagatagctaaaggaaactatattggcttcgtagatagcgatgactggttagataaaagtatgtatgaaattttgttaaaattattgaaagaaaataattctgatatttcatgttgcgatttttttaaaacagctaatagcgatggctcaatacctcatattgataatgagatcattaactcttacaataatatcgaaagcctaaataacttctataatgacttatatacacaaacagtagtagcttggaataagctctacaaacgagaactctttaaagatatttcttatcctgtaggcaaaattcatgaagatgaaggcactacatacaaattatattataaagctaataaaattacttatactaatatgcctttatactactacagaatcacccctaacagtataactacaagtaagtttaataaaaaaaggttagatataatagatgtttacgatgaaaaagttaagttcattaaaaatataaataatgaagaaatatattccaaaacattaaaatggtatttatttaagcttataaattgttattttgaatgttctaataatattgaaaataatactgaatatttaaccttgattaaccataaggtatcagaaacatataaatcttatattcaaagcaataaaaaacagcttcactggataattttattttctatatttaaaatcaatcctaaattatataaaaagctattgagaagttaaaagataacaatataattatgttattcatattttgttttgttcaatgattattagagaaaataacaagtctaaaatgccttgtgtattttgcgtcatacacggaaagatatctatctcatagagaactactagcttagtttccgtactaaacataatgcaaaatccactaacatattgacttgttatttttctattacctctaaaaattttttcttgattttacataatgcggaataaatcccgagacttggcttaaaatttgcttgattatgtgctataatattttgtattgaatttaaggagtgttaaaagataatgatgacaaaatattttaaaagttttatactattctttctaatctgtttatcttttcatctttttacagaaacaatagtatatgctgaacagcaaacaaatgaaatttcacaaaaaacaaatgaatcaactttacataattcaacaaacgaagattcttcaaaaaatactaacaaagatatcagtacaagcgtttcaagtaacgaatcagaaaaagattcaaaaaaagacacagataataataataacaacgcaactgctgtaccgaataagcaagaagaagtatctattccatatggatggaaaactattgattctaaaaaatactatatagttagtgataaagtcctcgaaaaaactggatggttcatggagaaagatgttaatcctgatataacttctaaagataaaggctatgatgataaatattatctagatagtgatttttcagtagtaattggctggaaagaaatagaaggaacctggtattacttcaataaagatggaatactgcaaactggatgggtttatgataataatatctactatacagacaagaacggtgctatggaaactggatggcaaaaaatcaatggggatacttattattttgatcaatacggtcacatggctactcataaaacattaatagatgataattggtatttctttagcgatgatgggcaacttcaaaaaggcctttactattataaaaataaagaatattattctgatgacaaaggaataatggttgtaaatacttgggtggattctagaaatcacaaatattacataaaatccgatggttctgttgcgactggaaagctttatttaaacggaactatggaagattttaattcaaatggttactaccaaggttcagataaaaacgataaagattatctatttgtacgtcatttaaatgtaggtaatgctgactgtgcatttataagattacctagtggagagaccgttttaatagatactggtgatacaacaactagtagtacattaatagatttcttaaatagccagaacttaaagaaagatttcttccaatctactactagtagtagtgtacaagctgttgaatccaacactagcaagacttctaatggaaaaggagttgtagattacgtggtgcttacacatcctcactcagatcacattggtggagtgattgatttgcttaaaaactttaatgtcggaaaaatattagttccaaaatactttgaaatgaaagattttgcaagtatgaatgatactacttctagtgccagtgaaaaagaaattatgaaacatgattatgaagtatatacagcaacaatgaatgctataaagaaaagcggagtacctttagttacagctgaaccaaaatcatatattgatagcgcaaatattttacaatttgttcatgctgataaggattatccaagctttgaagcatctaacctttaccaagaatacacattgctaaacaataactctgcacttgtttatttgaattatcatgatcttcaagaattatttgctgcagatattgaatggggcgcagaaaacgactttgttagtagaaaagccttagatggaaaagaagttgatgtattaaagattcctcatcatggaaatccaacatcttcatcgtatccatttatcggatatgttaacccaatcgtgggaataatttctagagctaaagaatctattagcactactaatgaatcttacaatgttctaactacatgtggtgttaacatatttgagacaagcagtgatcctgctggaatttcagtatactctactaaagataattggaatgtggaaccagcaaatagtaaatcttaatattaactcaaatttaaaaaaagcttatcatttgtacttttttacaaatgataagcttaaatctaattacctaaagttttaatctttccttgtcataataatattatttagtaattcttatgcctgaatattatcaccatgttgagctgccaattcattttttaagtttatactatcttgtctcttaaagaatggaaggtaaacgaagaatgacatcactaatactaataactgtaatattgctgttctaactccacctgtcaaaagtcctgatattggtgccggagttgtccatggaaccattaccccgccaaatggtggaactattcctgttaatattgcaaaataaagtattgttcctgatagcattggagtaattataaatggaattgccataaatggattcattactattggtgttccaaatgtaattggctcatttatattaaatattcctggtactattgcaagttttcctagttgtttgcattgtgctgattttgcaaaaaataacatacatattactaagcctattgtcataccagatcctgttactgtcataaattgatcaagaaattgctgtgttactatatgagctccatttgctattgataattcttttccgcttgtaactatagctgcattgtctaaagtatttgattgtaatattcctgacattacaccgcttactattgttgctccatgaacaccaaaccaccataagaatggaattaaaaatcccatgactaaaactccacctaatgagtctgtcataccttgtaatggtgtttgaagtactttatatatccattcaataaatgttgtttgtaatccccatttaaatatcatataaactattgttgctccaagcactataactgctgctggtattaatgctgcaaacgaattcacaactccctgtggtacgccatcaggcatctttattgtaatcttatttgccataaaccatgagtaaactgctccaactattaatcctattataattgcggtaaccattccctttccaccacaccatgctgttggtatgacatcccctactgtttctccgcttttagtcgttactgaagagctagttgttaatataaatactacaaatgatattattcctgctgataaaggttcatgaccttcatttttagcataagtgtatgctattcctattgttgcaacaagtgctatcatattaaaagttgctccatttgctttaaacagtggatcagtccatcctgcacctaatgtaacatttagccaatcatttaacggttggtatggcaattgagctagcaataaaaataccgatcctaccaaagttaatggtaaagtgaataaaataccgtcttttaatgcaacaactccctttaaaccaacaaacttcataactattggcaatactttttcgtttaaagttgtcccagatgatgacataataattcctccttaaaaattagtaaatataaattaacaaggtttattagataatttataaaaaatgatattgtaaaaactttttaactattttcctgctaacttcaaggcaaagtctaaaactttttgcccattcatcattccatagtcaaccattggtataacatccacaggtattcctttaggttcacatatcttttttgctttgttcaatgtatatccaacttgtggacccaataatgcaacatcaactccctctatatttttatccatctggctttctggaaaagcttcaatatctacatctatccccttattcttagctgcctccttcattttgtttactaaaagacttgttgacattcctgctgcgcaaaataatctaattattaccatggttcattcctcctgaaatataaatttatttatataaacttttaataagtatccttataaaattttaatctatttgttaattatttaaccaacgtatttacaacttttcttagttcgattatttgttcaattaagtttttctctgttattgctgtcattagatgatcttgtgcatgcacaaacaaaactgacatatcaatcttttcaccatttgcttctttatgaaggaacattgtttgcccatcatgcgcttttgctaatgcatcatttgctaattccatttccttatcagcttcttcgtattttccttcatttacattgttaagtgccatatacgcatgatttttacaatctccagcgtttattataatgttcatgattgccatttctaactcttccactctacactcccccattcaacgtcttttagaatattttcccttttatcctattgcatagcataaattgtgccaaacactattctgctttttagtagacattattttaaatatattgatattatctatattaatcctaatcccggatttataaaacgtttacaagatttctatgtatccaaattgtcattaatcttttatatgtttacttaatataatcaatatctaatataagagtttgattattcttattagcgttttggtaatattacccagtgtttagatgaaagtatataattgtgattagtgtttgaacacttccaagaactgtttaatcactaaatttattttaatcattaaaaaataatttctacaactagaaatgaagcaaattacataggaataataaaaagcatcttcttaactataagaaaatgctttttatttacaatataaataattaaattatatctaatttttattgtacactaactccaaaatataatacttttccaagttcagtatcttttattgattgttttgcaattgcagccgcattttgttgatcactaaggctacactcaaaaagtatcttaattccttcttttctaacaaatttaaatactttctcattctcaacttcaatattttctactatatttattatatcgtcttgtcttaatgcacagtttattaatatcatctttctacctcactcctatttaatcttttgaaaaaaacaactttatcttaatttgatttttaataattctttattatactttgattattaacatattatatcatttatttttcagaattatactgagtaaactctaacatttcaattattttctcattgagcttctgctattgcagaaatcataattccaataattagaaatgttagagtttttaaatttattttaaattgttaataatagggctaattaattgtatttacgcttgagcgctattttcgtgtttttgtgctgctaattcatcagcatatgacatggcatcaactttcttaaagaatgggaagtatattgccattccaataagtaggaatactaattgagctatagcataactagggccaccaattattaatcctgagaatacagctggaactgtccaaggtggtaatgctccacccattggtgcaagtatacctgttgcaattgctaaataaagcaatattgcatttactactggagtaagtataaatggtacacccattattgggttcattactactggagtaccaaataatactggttcattaatattaaacaagttagctggaagtgctaatctacctaattgtttatattgagcagattttgcaagtactaataataatatagtaaatccaagtgtttgaccactacctgctaagttaataaagttatcatagaattgttgagttactatatgagctccgtgagcaagatctaaagtccctgcttcttgtaatttagcattagctgcagtattagcagttaataaagcacctaccatacctgatactgtcatacctccatgaattccgaagaaccataagaatggaacagcaaaagcaataagtatagctcctggaagtgaatctgatgcagcttgtaatggtgtttgaacaactttatatataatttctacaaaagaagtattgaatccaaacttacataccgcatatacaacagttgcacctataaatataactgtagctggaattaatgctgagaatgcattaacaacaccttgaggtacaccttctggcatcttgattgtaatatttttctttaccattgcgcaataaacaaatgaaacaactaaacttacaataattgcagtaatcatacctgatccaccagtccagtcttgtggaataactccaccaacttgaattggagttgcatcaggtgttgctttgaacataacaaaatcatttgttacagttaagaatacacttaaagcaattaccgctggtgaaaaaggttcaagaccttcatttttacagtatacataagtcatacctataacagctactactgccataatacccattgttgaatgctgtaatttaaataatggatcattccaacctggcccaaaagctccagtcataccatctgtaaatgcctttactggaaagcaagcaattaataagaatatagatccaacgatatttaatggtaaagtaaataacataccatcttttaatgcttgaacacctttaagattaacgaatttcattaccgctggtactactttttcgttcagtgtttgattgagtgacataataaatttcccccttataactaaattgtgattataatatgaataattacaaataaaaatttgctattattacttataaacttacatatttattttgttttcctataattgttgttaaaggttttcttttctcatataaaatatgaatataagttaaccgattagatatatctttatatgtgcatttgtatttttacttaatcatgtaaaactacaaatgctatttatttttgcaaattatttcttattggttaagtttataaaaataattaatttttcaattatttattttttgcaagatttaatgctagatctaaaactttagctccattcatcattccataatcaaccattggtattacttctactggaatgccatgtggttcacaaagtttctttgcttttcctaaagtatatcctacttgtggtccaagtaatgcaacatccatactatctaaatgtctatccatttgagattctggaaatgctataatttctgcatcaacacctttagctttagccgcctccttcatcttattaactaaaacacttgttgacattcctgatgcacagaataatttgattgtaaccatatttcttcctccttgatttaacttttataaattttaatatgtttcatattttttatacggttttgtgttaattttaaagttacttacgaattttatttttatagtatttacaaaataaagcttgtcttatttgcttttccaaatttcaatttgttattttactaaagtgtttacaatttttcttaactctataatttgttcaataagattcttttctgatatagatgtcattaaatgatcttgtgcatgaacaaacaaaactgataactctactttttctccagaagcttctttttgaagcatttctgtttgtgcatcatgtgcttttcctaacgcatcatttgctagttgcatttcattttcagcttcttcatacttaccttcgtttactaaactaagagccatataagcatgatttttacaatctcctgcattgattataatattcattattgccatttctaattgatccatttgtactcctcctccaatttatccggtagctggcatccgtaatactttccataatatagttaacggctacatgctcctggataagttaaactaaaattcagaagatatattaaactccaactgaataaagttttacttgatgctttattgcttcatgccaatatatatagcaatacctgtgccaaacactattaaatattttaatttttttctaatttttttgctgtttaaattttacatactatcggatcgctcctatatatcaacacttataagcaaaatagataatataatttcatttaaaagttatatcatttttataataaaagttatatattttatttattttatgatatgtgtttacttaatacacttagtgttttataattatatatagtgtttaattaatttcaaaactgtatataaacactaaataaacaatgtttgataataaatagttttactataatagtccctttaccgtagaattttcagcatagcgtatgaaaatacttaatctatttatagtagctataatatttttatttatataggaggacatataatggctaaaaaagatttaatttaccaaaaacttctccagcttaattctccagatgggatagatacaaaaacactagctcctctagttaatatgactagagctaacttaagccatgaactaaatgaactttgcaaagaaggtaaattatataaatcatctggtagaccagtattattttttcttgctgaaaataagattcaaagcaatgaatctcagttagatttgttagctaaaaataatatttctcttaaagattctgtagaacaggctaaagcagctatactatatccacctaagggtatgaattgtttaatattaggtgctactggtgtaggaaagtctatgttcgcatctcttatgcacaattatgcattggaaatgaaggtaaaaacagaagattctccttttatagtgtttaactgtgcagattatactaataacccacaactattaacttctcaactttttggtgtaaaaaaaggtgcgtatactggagctgaatctgacaaagtcggattaatagaacaggctgatggtggtattttatttttagatgagattcacagattgccacctgaagggcaggaagctctattcatttttttagatacaggtacttttagacgtattggggattcagaaaccagaaaatcagatgtattaataatttcagctacaacagaagacccaaattctgctttattaaacacatttacaagaagaattcctcttgttattaatattccttctcttaaagaaagaaacttagatgaaagattatttttaattaaaagtttcttcaaatatgaaagtatccgtttaaataaggaaatttatgtatctttaaactctcttagagcattactttcttacgattgtcctaataatataggtcaattgaaaagtgacgttcagctactttgtgcaaaagcatactctgaatacttaactaatatacgacgtgacgtaagaatccatagtaaaatactgcctccttatattaaagaaggtctttataaagaaaaagagcatagagttttatggaacaaacttatgagtgaagaaattgaatattttagatttaatggttctaatgaagatacaaacactatatttaataatggagataatactatttacgattttatagaaagtaaacttgaaaagcttaagtctttagaaatttcagatattgatattgagaacattcttgagaaagatatagccaaacatttcaataaaaataactctgaagtttccgaagaaacaagcaaacaaaacttattaaccattattgatgaagatacattaaaatgtattgatagtatagtaagtcatataactcgaaagcttcctgtaatttttgatagtaatttatatacggcttttgctctgcatatcaacacattaattaatagaataaatagtgacaaaataataataaacactaatttaaatagaataaaagatctttatccttctgaatttgctgttgcactagagattaaggagatcatagaaaacactattaataaatcaattccaatagatgaagctggatacttaacattattcttgataccagataatacttttaacgataaatctcaagataaagtgaaagttatcctaattgcccatggtgaatcaactgccacttcaatggctgatgtttctaacagactacttggagaaaactatataattccaataaatgctccaatagatgttgctccatcaaaagtattagaaagccttaagattggtattcaggacaatccaacttctgctggctatctcttattagtagatatggggtctttaacaacttttgcagatgttataaaaaaggaatttcaagtagacattaaagtgatatctcttgtttcaactttacatgttttagaagcagcacgaaaagcactaattggatcatcactagatgaaatatataatgacgttcttatggtaaattcttatgtagaaatacataaaaatataagtaatccttctagcgattctgataaagttttaatagtaactgcctgcttaactggtgagggagctgccattgcaattaaaaacttcttactaagtaatcttagattagataaagattattttgaagtcgtttgtctaaactgcttagataaaaaatacttcaagcaaaaaataattaatcttcaagaaaaaaatgaggtactttttatagtttcatcttttcctgtagattcacctataaaacaatatacaatgtacgaagtatttaacatgaatgtattaaaagaattacaaagtataattgattcaaaattaactatgattaatctacctaaaattataaaggaaaatatatataatatagatggtgttgaactttataaagatgtaaccctatttttaaatatattacaagagaaactcttaattaaattatctgatgaaaatatggttggcgttattctccatttatcatttgtaataggacgattaagaaatgaagataatccagctgtttatcctcaaaaagagaaatatctagaagaaaatttaaatctatataatataataaaagaaaatttaaactttataactagcaaatataaagtagaaatatcagatgatgaaatatgctatttaatgaatcttttatcaaattcagctcctgaattacaaagtaaactttaatgccaatatatccctataaaagaataaacacattcttttatagggatattaaagttttacttagaataatcagaagaatctactataaacttattatgtagcctttttcccatactttcaataatatataatacaggtatttgtgttgttatatcactaattcctagtctttcttgttggacataatacgatatattaagatctgatattttcgatattgtgcagttttcactatttgttatgcttacaagcgtagtattctctctttttatattacttatataatcaataaccgtacgtgtttcgcctgaaaccgacattgctattattattgaatcttcatatagcttataatttcttggaaaatacggatcatcaatatacatagaaaacttaccaattgatgaaaaatatctagctgcatatttacacagtattccggatgttcccgttcctataaatactacattgcttgctttctttattaaatcgcaaagtacatttaattttctatcaagctcgctattatctaattttttgaaaaaatcaactattatagatgtatcattatttactttagtactttcattttcttcaagatacaattttaatttcactttaaattccgaatacccttcacagttcaactttttacaaaaccttaatatagttgttgttgagacgtgtgcttcatcagctaattctctaattctcatataaacaactttttcaatattcttcattatatatctgtatagagacaattctaaatcgtttaaactctggataatttcataattaaacataatttaatcaacctcttcctttataactagcttttttgcattcacacatacttgaatatattgttgtcttaaaatttaaaaaactatactagttagccttttatgactttgtggatactataatttatcttcgttatattatcaatcaaagttcttttaatttaagtatacagtatttgaaaaaaacttttaaggctatgtttgtaaaaattccttccagctatattataaaagcaaaatataccaaagtgaaatttcttacaccttggtatatttcatttatattagtatctattttttaatactattattctcttctaaatattatattaattatctttgactaaatttcttctccattagtttcgatgacttttttataccagaagaaactcttctttcttattcttcttaaatccttaagatcaaattcatctctatttacatatataaagccatatcttttcttgaaaccttggtgagtacttataagatctatagctgaccatggacaatatccaatcaaatctactccatcagttatagcaagtctagcctgttcgatatgttttcttaaataatcaattctataatcatcatttatagtatcattttcttcaacatcatcataagcacctaatccattttcagtgattattataggtaaattatatctttcataaacttcccttaaagtatttctaaatcctataggatcaatctcccatccaaattgagttttttccaagttcggattagaagctcctttgtaaacacctagatctcctacagcaatttgttgatctccaccttgagtcgaaacttctttgtcttcaatcttactttcctctgctgttcctgtacaataataattaaatgctatgaaatctggatttccaccttttaatatttccatatctccatcttcaatagttggctcgattcctttttcaaccatatagctccaagctattggattatatctaccatgtacagccatatctaagtataaccaattccttatagatgattggttactagccgctaatatatcttctggtcttgaacttgctggatatattgaacttatattaggtgcaggccctatttttgcttttgggcacatactatggcataacttcattgtttgcgcttgtgcaatcatcatatgatgattttgtttatataattctttttcaatattttctactccatcatttacagttccaattgcccctccatgaagtatcatcatattctgctcatttattgtaagccaatacttaactctatcaccgaaattttcaaacaatacttttgcataatttacaaatgcatcagcagtctttctatttgaccaactaccttctctttgaagagcatctggcaaatcaaaatgatacatagtaactaacggttctattccgtgtgataatagttcattgattaaattgttataaaattcaattcccttaggatttacatcgcctactccatttggtattattctagtccatgcaattgaaaaacgataagtcttaaatcccatttctgcaaataatgctacatcttctttgtaatgatgatagtggtcactagacaccttaaaatctggtgttcctgggaatggttcttttgtatcttgaacggataatccctttccatcttcattataagcaccttctacttgataagctgatgttgaagctccccataaaaaattctttgggaaatcttttaatttcttatgaaacatataaaaccctccattgcacattatctttttattattaacataaattttttaatcataataagttgattcctatgaattcaatatatcatatactgtaaccactttatatattttttataatttaggaacacatgctactttttaggtatttgtttttttagaaaacaagttgttttaaaaaaactgctacaggcaaaaattctttttttaccagtagcagcttcattaataatatccttaaattttcttatatatttctcataatattttttacattatagtcttatttgaacgcttagcttacactgtatcgtagatttaattactgtaacttctatttctttgctacattaatagccttttcaacaacattttctacagtgaatccaaatttctcgaataggatttctgctttacctgatgctccaaaagtatctaatgaaataacatctccatcaagacctacatatttgtgccatccaaagcttgttaatgcttcaactgctaatcttgcgcgtacactatttggcattactgattctttgtaggcttcatcttgagcatcaaataattcaaatgatggcatacttataactcttgcatctattcctttagcttctaattcagttgctgctttgtagattaattctacttctgatcctgatgccattaaaagtacatctggagtttctttcttagaatcttttaagatatatccaccctttaatgctctcttaggacatccatcatatagtggtaacttttgtcttgttaatactagtgatgttggagtagttccattagtcacagcgtagtaccatgctgctgcagtttcttttgaatctgctggtctaaatactgtcatatttggcatacttctaagagctgctaattgctctattggttcatgagttggtccatcttcccctactccaatactatcatgtgttaatacataagctactggaagattcataagagctgataatctcatagcacccttcatgtaatcactgaatacaaagaatgttgcacagaatactttaagtcctccatgagcatacattccgttagcgatagctgccatagcatgttctctaactccaaagtgaaggtttgatccacttctatcttctgctgagaaatctcctctatcgttcatatgagttttgttagatggagctaaatctgctgatcctccaataaagtttggaattagtttagccaatctatttatcattattcctgaagattctcttgtagccatttctttatcaaagttccaaagttcttcattgtttaataaagcttctttatcaagttctccactcatccatttagtatattctgctgcaagttctggataagcttttgcatatgctttgaacaactcattccaagctttttcagtcttttcaccttttgctatgtgttcattcatatttgtgtacacttcgtctggtacgtagaatgcaggctctgtcttccatcctaagttttccttcatagcaattacattgtctgctcctaaaggttcaccatgtgctgaagcttttccttgttttgctggacatccaaaaccaatttgatttttaactattataatagatggttttgttgtttctgctttagctgcttctattgctttttctattgcatctatatcatttccatctgctacatttagtacttgccatccataagcttcgtatcccttagctacatcttctctaaatgctatgtctgtatttccttcaattgaaatattatttgaatcatataatacaactaattttccaagacctaaagttccagcaagagatgatgcttctcctgagataccttccataaggcatccgtctccaactatagcatatgtatagtgatcaactacgctataatctggtttattgaatttttctgcaagatgtgcttctgctatagcaaaacctactgcattacaaataccttgtccaagtggtcctgttgttatttcaacacctttagtatgaccaaactccggatgtcctggtgttaaacttccgaattgtctaaagtttttaatatcttcaactgtaagtccatatccaaataaatgtagcaatgaatattcaagcattgaaccatgtcctgctgataatacaaatctatctctgttatcccattcaggattctttccattatgattcatctttgtccataatgtgtaagccattgtagctgatccaagtggtaaacctggatgtcctgattttgatttttcaatagcatctgctgataatactctaattgcattaatagataatttatctaattctctactcatctttatcctcatttcatagacatatttttttataagttcttagttgtgctaattaagtcccatactgcgcttcgcattcatttcaaaacagaaatgacctcagctatccatcaatttcttttaaaaaggtgcctattttactacacctttttatattgttacctttttttcttcgttactttttaagttcttttatattttcatttataaattcttatattcttatattcttaaattcctatattctttgattcttaacttctcatattcttaagaatatatatttttatctctatcatttggaacatgaataaatcataaatgatagtcatgattttgcgaaagcattatatcaaaatatttatccataaacatttatgccttcctaatttcagaatctagctattatatctctaaattactcttccattttcgaaatatgtctgcactagaaataagaaacatattttggcaatctattttccaaatgctgccgcccagtctgctttgaatctttctaatccttgatctgttaatgggtgttttagcatttgcattactaaactataaggtactgttgatatatctgctcctgcttttgctgcttctattacatgaattggatttcttacgcttgctgctattatttctgtttctattccatgaactgcaaatatttctgctatatctctaactaaatccatacctatcattgagatgtcatcaactcttccaaggaatgggcttacatatgttgctcctgcatttgctgcaagtaatgcttgtgttgctgagaatattaatgttacatttgttttaattccttcacttgctaatactttagttgcctttaatccttcagctgtcattggaatctttactatcatgttcttatgaattgctgcaatttctcttccttcttttatcattccttcagcatcttcacttacaacttctccacttattggtccatcaactatttctgttatttccttaataacttcattgaagtctcttccttcttttgctattaatgatggatttgttgttacaccacatattactcccatttcatttgcttctttaatgtgttctacatttgctgtgtctaaaaaaaatctcattttaatctacccctttattaattataattcttaaaactactattctacattgatatgattttttgctgcttcactatctgataaattatctcttctactcattaataaacacaaatcatctaatactatatgaacagattgatcaaataatgaacttaatagttggattgatgaaacaccggtatcattctttgtttttcctggaacctcaagtacaaaatctgatacttctgcaagtggagaatcctttttacttgtaaccccaactatagttaaacctaaatcctttgctgcttttgcattacttagtgtattttttgtttttccagaacctgatattgcaacatatatatctccctttttgagagctggtgtaattgtctctcccataacataagaattataaccaatatgcatcaaacgcattgcaaatccctttgcttgaaatccgctacgaccttcgccatctacaaaaatctttctttctttttggaatacacccattattttttttatctcttcttcatcaactttgcttattacatctttaatttcttctaatattttatctattattctcatttacctattactcccttaaattcttttactttttctatcttatcatcagcactagttattgctgatcctactataactagctctatattatatttattcaattctggtatggaatctaatgttattcctcctgcaactgcaattcttttaattgaaggaaactgttctttaaatctctttactgtttcacctggattagctagtttttctttatcaatagatgcatgtatgcaataaatagcactgctgaagtgtgctatttccttaattttttcatctgaacattccaataaatctatcatcattgttccattatattgctcagaaacttcgtaacatttttctatagtaccaagtgatgcactccccatcacagttaggatatcaaatccttgtctaaaaccttgttcaaattcataagcaccttcatcacttgtctttatatcacctagtatttgagatttacttttttggcttgttatgtcttttaatttaagaagtccataatcttttattaaagatgttccaatctcaataatatctgctaatccatcaaaagttttaactaagttttctgctttctctaaagacaccctatctattgcaacttgtaacttcatttcatcctccttaaattctcatgagacttttcttttataattttttaaaaaactatctaattcatctactgttggtaatccctcattatcacttagatgcattacttgaattccaccaatagcgtttcctctttctaaaattttattatcttcaagattttctaaaattccgctaataactcctgctgcaaatccatctccagctcctactgtatctaaaactgggacttcaaagcttggacactcagcttcttttaattgtccattttctaatttctccctagaatatgaaccggtagttcccatttttataactactttttttacgcctctatctaaatagaagtcagcaatctcttccttggaatctttccctgtaaacaatttcccttcgctgaaaccaggtaatacgatatctgatttaaatgctaactcattagtcacttgaatcatcttctctttactctcccatagtacaggtcttggattggggtcaaaagtaacaagcataccattctcgtgagctttctctatagctttaaatgttgtttctaaagttgtttcgcttaatgctggaaaaattcctgtaatatgaagcacctttccatctgaaaaacttatttcatttaaaatatctttagttattcttgatgctgctgccccttttctaaaatatagtacctctggatctccctcatcagttctatttttaaattgaaatcctgttggcgcttctttatatacctttacaaaagttgcatctatattttcattttctagatatttctttacatattgcccaaatggatcttccccaacttggcttatatatgtaactgtatgtccaagtcttcttagtcccatagctacattaagttctgctccagcaattaaccttgtaaaatgttctacgctgctaagatgctctttagtatctgctaaaaacattaccattggttcgccgattgtaataatctcactcatttttttcaccctttccgttgccaatatatagcaaaacttttcttacttcctctaattctcctcgtatatcttcatttctaattggatattcgatgattaatggtacattattagataacttctttaacattgccttccaattaatttgtccttttgacagtaaagttgtagtagggttattatttagaaactctacattttttaaatgaaatactgtaatagctgaacgtaagatatcaaatgcattttcaggatcttcattctgccaataccaatttcctaagtcgaaagtatatcctattggtaatgaatttttatttataatatcaatagcatttattacacatttcaaatttccattttcaggagtttgatcattttctattgttactttaacctcaaatttattaataatatctcttaatttttttatttcatctaaacttaaatctgctaagtcacctatattgaattttatatgagttgctcccatcagttttgcttcctcaaaataaacattaatgtctggatttaatttcttttcgcaagctactttctccggaactgaataatataattctattccaaattctttagctaatttatttataatcagaatttcttccgctaagttctttagacattctcttcttatttcagctatataaacatctaacgcctctatttgctctaatatttgctgttgttttattcctttaactaattcatctttaaatactaataaatttatacctagttgattcataactatccccacttatttttttatatttcttgttgagtaatttagatgtattttaactggaatttcttctaagacaaaatcatcttttctacttccatctattctttcaaatagtaacttagctgctctttctcccatttcatatgggttctcatctattgatgtaattcctgggccaattaatcgagcccatttctcctcagcaaaaccaaatataccgatatctactccaattcttatatttaaatcatataagcattctataagaacctttaaaatttcatcattatttgcaaagaaacagatattcttatctttatttttatttataatattttctattctttcttttatttcttttatatcattttttttgataatattagtttctcctgacgtatttggatttctagatagaaattcttccattgctttctttctctctaatcttgaacttatcccatttatgtcttctgaaaaatatacataatgatcatattcattctttagcaactcatctaatatgttttttgttacctctgcattattcattgtcaccgaatcataaattaatggatttataaatctgtccaataatactattggtttaaaattatcactatccttaaactcttctaaatatttatagttattacctgtagtgttaactagtaacccatcaacttggctgtctaacagtgattctatattctctttttctctctctgctaaattatcagcatttgttacaagtaactgataattatttgctctacatacgtcatttatacccttaatgagtaatgaagaaaatggatttcctatatctgcaattgttaccccaattatattagaatttttagcttttagtgtttgagctatacgattaggtctatattttaatactttaattgcttcatctattttttcttgagtttcttgtgacataaattcaaagtttttgtttagatatctagatattgttgtcttagagactcctacataagcagcaacatctgaaattgttacgttcttttgtttatctgtagaatttttcagcataacttattcctccattcaatacttttattatcaatcttaactgtcaaagattcaataatttatgctattgttctctatttttctttaacatatttattaattaacccaaccagattaaattatttcaataatactattcaccatggcttatcggtttagtttaccggtttctaaattgacaatataatgttaagactttcaccaaaaaatgtcaagccattactatatatcattttatatatttatctgattaagtttattattctagatatcctttacaaaactttaaataaaaggcttatccctatttctttaatactaggtttaattatatgtgattctttttatactctaaattcaataacttattgaatttctaatttatgatacctcaactgtattttctattttattagatgccttagaagttttaacagcaatcattaaaaatactgctaataaaagtgaacctgacataaatacatatgatgcatctactgaacctgttataccattcaaatatcctactacatacgaccctacaaatgatcctaatgcgcccatgctattgattaaggcacttgctcctccagatacattcttaggcaatatttctgtaattattgcaaaaaatggtccataaggtgcatacataacccctcctgcaattacaagtaaaatatatgatagccaaaagtttgaagttccaattaaatatgagccaaaaaatgcaattgtacctattaataagtatacccaaacaaatgtctttctatttccggtacgatccgaataataagatgatactaacatcaatactactgctaaagcatatggcaacgatgataaccagcctgctgaaacaattccaatttgaggactcgcctttagtatagatggtagccacattacaaaaccgtaaacccctatgctccagaagaagtattgaaatgataaaattattacctttggtgatttaaatgcctctctatagttttttactggttttatgcccttttgttcttcctccattacaatctctatatctttcttttcctgttcagttaaccattttgcttcctttggtttattatctgaaagttttaaccaaaagaatgcccatataattggcggtattccttcaagtataaacatccatctccatcctacagaatttactaaatatcctgacacaatagacatccatagaacagtagctggattacctaaaattagaaatgtatttgctcttgaacgttctttttttgtaaaccaattacttaaaaaaatcaacatagctggcataacagcactttcaattattccaagtataaatctagtaaccattaaaacttttacattcgttatcaaaccatttgaagccgctaatatcccccagaatattaaactccaaaaaactaattttttagcacttttcttttctgcaaaccatgctgctggtacttggaaaaagaaatagcctaagaaaaataatgcagacagaagtgacgctattgatgctgtaatatgcaaagattcacccatgcctcctgcaacaccaaaactgtaatttgcacggtccaagtaagctaggctataagtaataaatgctactggtattaatcttttccaccttttagaagttaattgaatagttgatttatccattttatatcctcccataataatcattttaatttccatataatttaataattaaaaacaatttcagcttattgtgcaatcatttgtttgctttaagaaatttattattccttcaatcagttgataatactatcgattaatttcttgcattcccccatccgtattagaactatctcgaatattttttaatttttaaaacttgaatttaaatttcaatattttttatacttttgctttagtttatcgttttagttaaccggtttctaaacttaatataatgttaacgctttcatcaaaagatgtcaagtagtatttataaaaagttaaatcaattatctgtataataaaaaagccactatagttctagacggctttactctagaaattagtggtttaatattacgcatataaactatatatacaaatttactttttaagatagtttgttctataaattcagagccttataaatagctttagcaactccagcattatcattggtatcagttatatattttgctatttcttttatttccggtactgcattttccatagcaacagattcagtaaattcagtaaacattgagtaatcattaaaactatccccaatcaccattacttcatctctttttatccccattttttccgcaactcttgctaatattaatcccttttgtgcatttttattatttatttctatatttttagtaaatgttgatgctatagcaagttcccctattgactccaatttgctctttacctttttagttgtttcttcatcattataaaacgcaacaaattttcctatcttaacattgctatttaaaaaatcgtttatgttttcaacatattttaaattaataaaatgaggatgacttttagctatttccatagcatcttcaaacgttgtttccgggtcgaagaccataattctgtatgcaacttcagttaatgcttcctctcttgtatttacactatataatccatcattagtataaatttcagctataattttttcctttaatatcatatctataatttctcttgcttgcttactatcaatgtaaattccttctaatacctttccattctcatctatgtattctccgccatttagaacgacacattgacattttaaattagattcatcaagcaaaggtttaacatcttcatacattcttccagtagaaattgcaaattttactcccatttcctcagccacttttatagcttctatattttcctttgatatcttatgattgctattaagcagtgttccatccatatcagctgcaataagttttatcatctcttaatccctccatactcgtttatatattctacaacatgtatttactcaaaattttcttgtaaaatatttacctataatttctattatatactataatacaaaaaaaataaggctaaagatacttattctctagcctcaaattctaaatagaattaattattaattttattctcttctatctatttatatattttttcatttatttattataactagtgccataatttcttacaaacataaactgtcttaagtaagattaacacctctatatcatacttttttctcatgtatatttacatatagctgtgaatattgcaatttatatagaaattaaatctttgacgctaaaattaacattaagatcataattttcatttatgttcttatattttattttagttgttttttgttctatatcaaaataccaaccttcttcgcttaattcccattcttttatatctaggaacatggcaagctttttatctcttaagttaacttgaactggagctatatccttacatattaaatctatattaatttctttaggctgcttgtcatatccgccttctttttcaaatgcaattttaacactattctctcgcttcactgatattaacgtctttaagtattcaccatttttgtagttattagttacaccatcgtcttcatataatgcaaagcttgattcctctgatggctctattagaagcttaagtgtttctattgaatcattatgaatattagttaagccttcagcaattggaattattgctccacttctaaagaacataggaattgagtttaatgaaacttcaacttcaatcgtctgtccaccttcatatgtctgttttgtatcccaatcaaaccaaacagctccttcaggtaaatatacttttcttgtttttgcacctttttctaggacgtttgcaatcaaaatagaacttccaagcataaaatcaaagctttcctcaagtaattttttatcatcttggaattcatatattaaaggcctcataattggtgatccttctttagatgcttcaaataataatgaatataagtatggtactaatttatatctaagttttatagcttcttttatatattttgtataagatggatacatccatggttctgtaacagtattatcagtattacaagaatgaattgaaaaccttggttggaatattccgttttgaacccatcttacaaatagctccggctcaggtgctggtccaaaaaatcctcctatatcacatccttgatttgcaactcctgaaagtcccattccaagcattactggaatattgaattttaaactcttccagcatgtattattatctccagcccatgtttgagcgtaacgttgaattcctgcaaatccagccctattcactatatatggtcttatattgggataaacttctgtgactgtttcctttgccataagtgccattaaatttggcattattggtcttaaaccacttatttctttcttcataccctcaaaatgacaaattgcttccgtattatttatttcatactcattgttatcattccatatagatgtaatccctaatgaaactaaagattcttttaaatgctttttccataattctcttcccttaggatttgtaaaatctacaaaagaagcttgacctccccaatatctatctgtttgagatttttctccttcgtcatcctttatataagcaccagcttcatcaaattctttgtatagcggattagaaattaacatacctggttttatgttaggtgctacacaagcccctttttcattcaattgacttacaaagtctgctggatttttaaatctatcataattccaattgaacacatatcgctttccatcttcccctgtagtatatcctgatgacataaagaaaccatcacaaggaattccttcttccttacatctatctaaaaatcgtaagatagctttatctgaatctttatctaattctgtgtaatacatagttgatcccatatatcctaatgagtactttgtagacattgcagtttttcctgttaaatcagtataatttctcaccacatctttgattttaggtccataaataaaaaatgtatctaattctccaccatcagcacagaaataactgtatttattccaatacccacttctttcacatcccatatcaaatgtagaatcatatgaattgttatagaatattccgctagctatgttatttttattattaaattttatataaaaaggtatatgcttatataatggatctgtatgttctgaatcatatcctatagtatccacattatgcattctcattcttctctttttcttatttaaatacccagctttttctccaaatccatagaaataatcttcatcatccatacatgaataatgataaattcttcctaagctatcttttacatatgatttttcttttaaatctgaatgtagcatattaccttgcttatctgtaatctctactccaaaaggttctttataaatatttatatttatactttttgtagctaatacaatataattacctaaatcttcatatctgctgctaattgcctctacttgttttctttcatcttttaataactcgtccattttatctttccaagctgtcataactaaagcgtatgatgcttcttcttgaaactcctcatcaaaagtacagcgaattcttactatatcatcatttaaaagtataattctatatttagctgcattggtagtgatttctaaataattatcaatattttttagacttataattttattacttatcttcataatgctatctcctagtatatttattttataatttttaccttatttacaatataagcctcatcttatcaactattttagcaaactgagaaatgcttatctacttctcaataatacagttcacaaaatctatgactccatcttcaacttcatccctaatatctaaataatattgtatttcatgacgatatcctgaataaacttttgtctttaccatgtgccctgtttctgcaagccaattcgacacagcataaacgccttctccgtacagaccaactggatctttatctcctgcaatattgtaaactttaattgatgttggcactttttctgcccacttaattccaacaatatcactcatcaaattcgcaaaataatatagtgaacgtatattaggctgcattagaagatcactatatatatctcttgcatggtccgcatttacatcaggatcaccacatgcccaggtatttgaagtaacaggattttcttcataacgttctgtattccacatccaccccatgagcatctctaagcaagaaggatcaacctcttcccccttgccttcatctattaaatttttaaaaacaggtattactgaactcgctgttggaattactcctgaagttccacataaaatcaaaccatcaattccttctccataaatagtagaataacatctagcaatcatcgatcccatgctatgcccaaacatgaaataaggtaaacctggatattcgtcttggacaattttgcgaagagtatgttcatcctccaccattgtcatataacctttatctccccaatcactccaattgtttgaaacataagcggtttttccatgacctacatgatcatccgctgcaactataaaacctgcgtcattcaattttaatatcatgtgcatatatctacgtgaatgttcatgataaccatgcacaagctggataattccccttggtttacaaaaaggagtataaatccaagcttgtaccatatcccttttattaaatgattcaaaacttttttcttgaaatgccataataaatctcctttgcttatataaattcttaaactaccttttcaattattagataaataccttacagcttggacttatgcattttaaaatatgctttaccagaaatgataggtactcttttgtaaccacaagggtcataatatgcagtgttacattagagaataagtttcaggcatttcttcatcagaagttgttccatatttgcttgtcaccagcttgtctggggaacatgcagaaatggtgcaacttctgatggtagaaatcctaaacttattctcagtaaccgaaacaacagagtacctgtcctttcggtgagtcatggtataagtctaggtttaagcattcagtactattcgtctcccataccaattaaatcaaatctttcacaagaaacaacaatatcaaattctttctttactggtttcttgcattttactaacactgttctatctgataattcataataccatccttgttctgctttttcccaagatgatttgtttaagaaacgaggtatttgttcattgtctacagaaacccaatatgcacctttctctttacttactaatttaattgtaagatcagatattccactttcataacttcctgttgtcttgaaagaaattttcttacgtgctcctccgcttacattgatttctgtcttttcatatatacctttttcaaaatcattagttacaccatcatcattatagaaattaaagcttctttctgcttctccacctattaaaatgtctaatgtcttcattttatcagtagtaatatgctttacttcttcatttgttatgaaaattccatctcctcttaagaacataggaatactgttaagggtaactggaatttctattacttgtccgcctttatatgcagccatattgttattcatatcataccaagtacagccttctggcaagtaaagttttcttaacttcgctcccttttccaatacattcgcaactaaaacagatggcccaaacataaatgtcatatattgatcatcataacaattagcatcatcttggaattccatgagtaatggacgcattattgatttaccagtagtatgagcttcatacattaaagaataaagatatggtaacattctataacgttgactatatgcattacgtacaaattcattattttcttcatacatccatggctgagtaacagtattatcattattagctgaattaatgcagaatcttggctggaatataccattttgtatccatcttagtaatagttctccctctggagcacctcctgcaaaacctccaatatcacaacctgtatttgctactcctgataatcccattccaacaatagttgctatattaaattttaatgtacgccaatctgttaaattatctcctgcccatgtttgtgcatacctttgaatacctgcaaatccggcacgatttataatatatggacgacgattaggataaagttcagctacagcttgctttccaacataagccatcaaattagaatgcattattttaagttcagccatagtacctggttttccatcaaaatcacatacagcattacgatcctctattccatcatattcgcaattgtcattccaaacagttatagttcctttacttaaaatattttctttaagtagcttcttccacgtttctctaccagatggcttagtaaaatctacaaatcttccaacaccgccccaccaacggccattataatctccttttccatctggatttttaataaatacatcattttcttcaaattcttttttataaggatgcttagctaaaatacctggttttaagtttggtataacattaaggcccatttcattcattttttccataaattcatctggattcggaaatctctttttgttccaattgaaaatatatcttaaattatcttcttctccagaagaataaccagatgctaatttaaagttgtctatatacattttttcatcaaaatgctttttaattacttcatatatttccttatcgcaatctttttcgagttcagcataatacattgtagaagctgtataacctaagctttgtttaggaggcattgcctgctttcctgtaagttttgtgtaattatctaagacttgttcaacttttggtccattgacaaagaatatatcaatgtctcctccatcagcttgataataactataacgaggccagtatccactaatttcattacccatatcaaatactgaatcataggaattatgatagaaaagtccaatggcatgatgattattgttatttaacttaatataaaatgggatatgtttatataaaggatctccaaattcaggatcatgcccaattgcatctttaggcgacatacgcattcttctacccattttatctaactttccagtcttttcaccaaatccgtaaaaatgatcattttgtaaatcaacttcattataatgagaaattcttcctagttgatcacattcaaaagctctatctgcaagatcactatataacttttctccatttaatttatatatagaaaaatgtaatggtgatttagctagtactaattttaatgtttttgtataaaatataatttctttttcattttctttaaaaggaatatctaatgcttctattctttcacgttcttctgcaagtaaagaatcaaaacgatcctcccatgcagtcgtaaccaatgtataagatgcttcctcaaactttctatcaaaagaagctctaacacgtataatatcatctgacataaaaattatttttatatctgcggtatcccccttcactaaataaccattctgtattctatttatagacataaattcctttaataacatgtaacttcctcctaaactactaatttatacttattaatctatcaacaacctattaagacgtagattgcccgtttataaacttgttatataggttgttgaattatgatttttttcaacaactgtcaaaactcaattatttaacaacctatatctatataacattatgagagtagcaaaataacttaactgatactattcattaaattatcttgtgtaaaattctgtttccaaacatcctcatatttatatccagtaagactttcaacaacttcttttgtgtttgagtcaacatcatcttttaaaccaccatttttcaaacgttcaacttcatctattaatatctgatgagtttctttattaagcttaaaagtaaatgcaagtattaatgataatgcaaacaaaccaacacatccaataagtaaaacatatccaataatctgtactgtttgaggagattgaacctcttgacctttaacaaatcctccttcttgcaacacaacgccgattaaaaatgtagcaatagctacagtgctctttctagtaaaagtcataactgctgcaaaaagtccctctcttcttttcatcgaaacaatttcatcaacatcaggaataaatgggaacactgtccaaggagttagaaccgccaaggatctaaatgcaaagtaaactatagatattccaagtaaaatagcagtcttagcttcaggatcagctaaataaactccataatatgctagtacacttaatatcataaatgtatacgtaatcttatataatttagtaggtccaagttttaaaaataaaattccacctataattgttcctggtataccaataatgctaaatgaaagcaaatatgcaccaaaagatgatgaaacctttaaattataaacacagaaaaataaaaatacagcattaaatatatccccagcagtaaacgataataaatacagtcccaaatgtttcctgaaactttttagcttaaatgtagatgcatattccccaagcacttttaagtaatcactaaaattcctattccctttagattgagatgcagccaataattcttgctccatcgctggtgtaatttctctttcccaagtcgctttatatgttataaatatacaaatcgcatacaatattgcaaaaaataatccattatagaaatatgcataaggattcttttggccaaaatgtccaatcaattgtgcaggaacaaaagtccctaagaactgacctaaagaagaaataactaatctgcaagtagaaattttagttctatcagagtagttagttgtcatttcagtcggtagtgtttcccatggaattaataccatggctgcaactatttcaaataataaatagcaacttaaataaaaccagtaattcattcctattgtccatattaatacataaattgccattaatggcgctccaattaataaaaagaaacgacgtcttccaaatatctttccaagcttagttttataaaaattatcagatatactacctataaaaagactggcaattgcatctacaaaacgagcaactgcaacaatagatgccccttgtataggtgtaagtccacaataagttgtatagaaaaacaataagaaagctccaattattgtaaaggctccgccgcccattatatcaactaatccatatccaatacatctaggtaaagtaatctttttatcttttatagacatataatctacctctttctttaattaatatttttaattagcaatcttctatttaaatattgaagtattcctttgcattgttgtagcatataccttcaacaactgtttttagcaatttaatatttcctggtacttcaccattttctacccattctcctattaaattgcaggcaattcttctaaaatactcatgtcttgtatatgataagaaacttctagaatccgttaacattccaacaaaacggcctaataatccaagatttgctaacgctttcatttgttcaatcattccatctttattatcgttaaaccaccaagctgcaccgaattgcatttttcctggaatcccctctccctgaaaatttcctatcatagctccaagaacataattatcctttggattcaacgtatataaaattgttttaggaagtgaattttccttatctacagaatctaaaagtctagataatgggtacgctatactctcatcattaattgaatcaaatcctgtattagggcctattttttcgaacattctattattattattccttagcgcagctatatgaagctgcatagcccatccaagctcatgataaagtttaaatacatgtgttaatgtataagttttgtacttcttttcttcatcaaggcttattacttcaccatttaaggctctagcaaatatagctgctgcatcttcttttgatgcatctgcataaactactatcccatctataccatggtctgctatcctacatccaaccgaatggaaataccttactcttgagtcaaatgcatttagaaattcatcataattacttatagtgatctccgatattccttctaatttttttacccatgaaacgaaaccatctaagtttatttctattcctttatctggtctgaaagttggtaaaacatttacattaaaactctcgtcttctttaatcttaatgtgatattctaaagtatcagtaggatcatcagttgtacatatagtttcaacctttgattttgtaattaaatctcttgctctaaatccttctccacttaacaattcgtttgcttttttccaaattgctggagcagtttcttcatcaagcggttcatatattccaaagaacttttgaagctctaagtgagtccaatgataaagaggatttcctatagacataggtatggtttttgcccaagctaaaaatttatcataatcactgccatcacctgtaatatatttttcatctataccattgcatctcattgctctccatttgtagtgatccccgtacaaccatgcttcagttatgttattaaattttttattttcatatatctccttaggatcaatatgacaatgataatctataataggcatattctttgcataattatgatataactccatagctgttttattagataataagaaattttcatccataaatttcttcaaattcatcatcctactttcaaataaaagtttaatatttgtaaagcattgaatggattttctttaacggtacacactctgctaattagagtacattatcgtaatctttatatatccaacaccctactataacgttttcttttacactaatctttgtaaattttcattacttagattatgttcccaattctaatatttctttaaatcttcataatctaagcaagattgttagttagtacaatttgtgttataatatatttcttaataattttcttagcatttttatcattctttgtttatattatttgccagaatataataaactggaatgataaaaatgttatttttttacatatctcaatttcaccataaactatctgcattctaagtacttttctaaagtagacctaacagcaccagttccagaaatcatttcggtgaaataaccttcaattttttctcctaatcctataacataaagatctacgccaaaaatttcttcattcattagtatcggttttagagtatctcctaattgttctatagtgcctaattttatattagctacatatttctttagttcatctaataatggatctggactcaattccattgcattaccatcatcagctattcccattaaatatctgcaccaacctgcaataacaagcggaatgtatttaaggtttttagtatctaaatctactctatctctgtaagccttgattgtctccccaaatcttataccaaccttttgagatgtatctgatgcaatcctttgaggagtatctggtatatatgggttcggaagtctaacttcaagtacttctttaataaaatcttcaggttttaatattccaggatcaacaacaactggcattccttcgtcgtacccaatcttttctactagtttctttagagcttggtctttcatttcgtctgcaattaaattatatccaagtaaacatccaaatactgctaaagaagtgtgtagcggatttaaacaagtacaaaccttcattttttcaactctctcgactgtttctctgtttgttaaaaatactccagcctcttctaatgccattcgtccatttgggaaatcatcttctataacaagatactgaggtccttctgcatttacaaaaggtgcaatataagtattcttattagtacatataatctcagtactgtcaaaaccgttttctcctaaagtatctttaacactttgagatggtctaggcgtaattttatctatcatactccaagggaacgatacctttttatcatcattgatatattgtagaaagcctttatcaactaatccattttcagtccacttctttgctattgtttccattgcatcatgaagcttttcaccattttttgaacaattgtccatacttacaaaagctattggaagttgtccattcttatatctcacatatgttaatgaagtagctttagcaataatacttacaggatgttccaatccatctgttgtatcttcttcagatagattttttacgctataacctttttcagttatcgtaaaacttgctatttgtaataatggatttgaaaatatatctttcaatctattccaatcttgtcctcttgaatagtcacaagctaggctttctcctatgcttcctacaacttttttctccaagcttccatctggcttcataattactaacaaacttaaatcatcatgaggcgcataaattttatctattatttcatagtcatatccttctacagcaacaatacctccagttactcttttattgtttaaaagttcttgttgcaacatcgctataaagcctctaaatatatttcctgctccaaagtgcacccaagtaggattttccttagttaaagttgacatcttatcatgatcaaaccttggaagttctattccagcattttcccataactcgctgtttttaatacttcctttgcttagtattaatttggcattattcattcctattttcacctctttaaaactactattaatagcattaccaattttaattatctttttcttaggattaataaatccaagattttattgcaatctctaattttatttattcttaagccttatttagttctttgtagtgtatcccatatcccccagatatacataattccaagagctctatcataaagtccataacctggtctacactgctcattccatatatgtcttccatgatctggtctcgcatatccagtaaatccaaattcatggtaagcttttactatgtcacatatatctaatgagccatcacaagttctatgagatgtttcaataaaatcaccattttcataaatctttacatttctaatatgagcaaaggcaattctgtttccaaattctcttatcattgctggcacatcgttattaggatttgagcctatagcaccgctacaaagagtaaggcagttatatggactatcaacaagctttaataatcttgctaagtcgtttctacttttaactatccttggtaaaccaaatattgaccaaggtggatcatccggatgaactgccatcttaatatcattgatttcagctacaggaataatttgctctaagaaatatttcaagttattccataaatcttcttctgtaacatttttatatgcttcaaaaagttgtgtcagattctttaatctttctggctcccaacctggcattgtaagatctggatttgatgctatcttgttaaccaactccattggatctatatttgtaatccttgctttttcatagaaaagagctgttgaaccatcttctgtttttttatacaagtcagttcttaaccaatcgaatactggcataaagttatagcaaattacttttacaccaactttggctagtttctctattgtctttttataattttcaatatacttatctctagttggaagtcctaatttaatatcctcatgaacattaacactttcaacaacatctaagttaaatccatatttatcagctgatttctttacttcaagaattttttccataggccattcatcaccagctgccatatcatgaagagcccaaacaatcgtttctacaccgggaatctgtttaatttgctcaagtgttacggtatcgttaccttcaccataccatctgaaacccattttcataataatatacctcctgtcattttatctaatttggttttaccgtatagtttttttgccagcatataaagagtttaaattgaatgctctatataggcctcacctccctaaattgaaaattcattttaatatcagatgattttatatcatagcatctaatatttaagtgtgttatataaccctaatctttgaaataattaggataactttctcttacttgtgttttatcaaagatgaccatatttaaatgcttcttcattaattcttctgccatatctggatttttattttttatagcattaaatatttctttatgctgcagatagatattatcccaactagaattaactgttaatcttaatacacgaattctttgaaattcggtacttccatcattaatactattccatatcctctttttgctgcatccttcaaaaattatcttgtgaaattcttcatctgtattaaataattttttatagtctttattttctatatacattttttgaaactttaaattcatttccaaagccaatacattttcctttggaaattccatgcaggcttcttttactacagctctttctaaatgctcacgtaaaaatctttcttcttcaacagcagataagtcaattaatgaaacaactgtgcctttctgaggataaatttgtactaagccttcttgagctaatcgaacaaaagcctctctaactggagttctgcttacattatatttttcagaaagttctttttcagaaatgcttgtaccaggttcaagatatagattaataatttcttctctgagattatgatatataaccttactcgtagaattcttacttattttaaaagtcatacttatattctctcccattgacgtgttttaccatacttgtatggtaattatgagtatagtctcgctgtctaagaatcgtttacaaagatttgtatagtaaatcttttcacttgcttttccctaattgctatgattaaattatagctatacaactatataaaaaatatgttttaattgcttcaaaacttgcaaaaattgctatagtaaaatataatgtatctcagttttattaaaaatcacttatacaaataatctctttcgcaatttaaaacgtttaattgtttaataattcagtaattttatcgcaatttatacaattcgtcgaagaggtgatatcaatgaaaagaaaaatacatgagttttttacacgaaaacatatgctttccagtgactacgaaatctttcacttcttaaatactgatgtgccatttcaatacctacacaatcatgacttttatgagttttatctatacctttctggagatgttacatatttgatagaaggtaagtcatacaatctaaaatcaggtgacatagtattaattaatacaagagaactacaccgagctgttattaatagcatgaaagtgccttatgagcgtattgtactctggatcaacaaatcttttctacatgaattgtcaacgccagaaacggaccttacacagtgctttgaaaacatagagaaatcaaatgttataagagctgattttcaaattcagcagaatgtaagggcacaacttagcaagctacttgaacttgaaaactacaaaggcttaggtaaagatttgctatataaagcctatattatagaacttataatacagttaaataatcttgttttaagtcataaatctgattttgacattgatgtgacgaagagcagcttaattgatggaatagttgaatatattaataatcatattaatgaagaacttacaattgatgagctttctaaagaattttatcttagtaaattccatttatctagagaattcaaaaagtatactggtactacaatccataggtatatcgtacaaaaaaaattaatacaagctaaagaattaattcttaaaaatcatccgataaatagcgtttacaaacaatctggatttggtgattactcaaatttttttagagcctttaagaatgaatacagcatttcccctaaacaattctatgaacttatggttgaatctaatttgaagaaataataaacattagaaattttatgatatatagttttataataaatatttcaatagctttttctattaaaaaaaggaaataacttatttaaatttatcttatatatatcttttttaataacaaaaccgtgctaaaatctatatgattagagaataactggacaaggcatataatgtagagaactaattgcaacatatgtacatcaacgaaatactttaaggattttacttaattctctaattaataaattttaaatgaacaagatacaaactcattattaataatttattacaagaatagcatatgtaagtactattcttgtaattttttgtgtagatatatataatttatttaaatgtacaccaaaacttgttaaaataaaaaattcgtaaataatttgaataggcttttttgaggtgaaaatatgaaagcaaatgtagaaatagttcttggatttcttggctctggaaaaacgaggtttataaattctatgctaaaaagaaaagaattacaagatgaagctatcgttgttatacaagatgaatttggagactgtcaaatacaggatgacttgaataataaaaatccaatagtagtaattaatgttgataagaataaagaaattgatgaaagttatataaccgaaatcgtaagtaaacatgctccgaataggatttttatcgaaataaatggtatgaaagattctactaaagtaattaatatatttaatacaaaaaagataaagagtatatgtagaattgataacataataaatactattgatacaacaagctttaatatgtatttcagaaatatgaaaagtattattagcactcatattttaaatagtgaaactataattttgaacaatgtagtcgagttagataaaaaagaacttttaaacatacaaaaagaaattgaaaatattaatgagactgctgatatactaaggcatttatacataacagatgataaaatatcaaataaaaaagaatatgtaaaaactacaaggcatggtttttcattctttaatacttttttatattcaggttttgtactatttttattcatttttttgattacgatgtcaacattaaatattaagatatccagtgcgtatttagatagattcaaaaaattttatgatgtatttataagcatattaattcaaggttttcccttcattcttattgggagctttgtatcttcaataattcaaatttgtatatcaagagatacatttattaaactattttcaaaaaatagttttttatcttgtgtaattgcagcttttgcaggcttattatttccaatatgtgattgtgggacaatccctgtggttaaagggcttatgaaaaagaatgttcctatagcagcaggaattacatttatgcttgcagcgccaattgtaaatccaatagcaattattgcaactctctatgcttttccaggtatggtatctgtcgtaatttacaggttagctgctggaatattaatctctgttttagtaggtttaattatgcagtttactactaagaaggatgaagaaattttaaaaaataattctgatatagatacatgtgattgcggtttttgtgatggtaaacaggattattcagaaagtaatctacaaaaagtcaaggcaatattcgttcatgcaggagatgaattctttaatataggtaaatatatgattattggaacttttttatctagtatttttcaaagtatgacatttataagtagcaatacttacatttctaatgatagtagagtttctcttcttgtaatgattttattatctttcttactttcagtttgttcaacttcagatgcatttgttgccaaaggttttttaagagcctttccaataagctctatacttggatttttagtagttggacccatgttagatgtaaaaaatacaatgatgctttttggaagctttaaaaagaaatttgtaataaaattaatatttactattattttagtgtcatttagcattttgattaactgcaaattaacttgataatattgaaaaatagctcaatatattatcatatattccatagctattatagataaattaattgaagggggtagcatatgaaaagaattagttcagatataattattaaaatactgatattgctatgttttgggatattttactttaagataattaagaataatgaaataataatgtatgtacatccaagaattattccatttgctattttaggaatgctagcaatgtttgcaatcgcgatattcctaattacagacagtcgtcgcaccaaaaagaagaatatcaagttaagaaattatgtaatcttcataattcccttagttatggtatttttcatgcaaagtactagtgcaaattcttcaataaaagctgatgatatggggggaaattttagcggattatcaagcactaatttaacttatgacaattctaagcctaatccttcaaaccaaaagattaacaatgccgaacagggtaaatatgatgatgatttatatatcaaagataatgttatagaagtagatatcaacaattttctgcactcctttgatgaactcacagagaacgcaaataaatatgatggacaagaaatagaaataacaggatttgtttataaagacacaacccttaacgataatgaattcatagtgggtagatttgtaatggcgtgttgtgcagctgatttacaagttgtaggaattaaatgtgatagtaatagtcaagaaatctacagtaaggatacatgggtaaaagtaaagggcaaacttaaaactgaaacagttaagtatgcagtgaacccagttatagtagtcgaacatatagaaaaagatcctaatcccaaaactgaatacttatatccattttaaaaatccttaactatctagattgaatatgtcataaactgtgccaaatataacgattaaaaaattatctttatataaaaaaataaactatgccactttcatttagtgttttattagcataaagagctatataaacattaaatgaaaattagcatagtcatataaggcataatccccaaaacaacaagtccagttgcctaataattattttataattttaaattcatatccttgtccctttaaatattctataacttctggcaaagcttttgctgtttcttcttttccgtacgtatcatgcattaatattattgctttttccctgtttgccacagtttttataacttcttgttttaactgttctgcttttttagaagcaccttctgcatctccagataacgaattccaatcaatttgatgataatccttgtcatgcaatgctttgtccatagcttctgctcctgacggatctttcttgtcccaagtcatttgtcctcctggaaatctaacagctcttgttgaaaaatcttctcctaaaatatttttcaaagattgatttgttttctcaaaatcggacatacaattctccaaatttatttttccatttggatataagtagttataatcatgcgaataagtatgattacctattgcattaccttcatcaaactccctttttactaaatctttgcttgcctgatctttatctatatattttcctataaggaagaaagttgcatgtacatcttctttcttaagaatatctaatatctgaggggtaactgtttctgatggcccatcatcaaaagtcaaataaacaactttcttaccatcagctccatcaggcctttgtcctttcatttgctgatttaaatatttttctacaaatgctgagttttctacttctgaattactttctgatttaagttcgtcactatccgtttcacttttactctgattatcacttgattcagattttgcattctggttaccatcaagtgcttgtacagtttttgtattatttgaaaatctttgcattactatgttacctactgttataaccaatatggaaataataataaatagaattgtgatctttgctactttaatgtttttatttgggttattcctattgttatacttcatttttcatccctcttatgtcttatctatgtgtgtcttaatagttttttattagatagcagcatattaagtatatgttgcaattgaattctataatttaccttaactaaatattcgtcttattagaacttttaaggttaagtatactattgcaacatatatactgagtatttgtagctaattatttaaaaattccttgtgtaaattcatctaaatcaacatcatggtttattccattaacaaatcctgtctcactgtattgatgtccaactcttgaaaaccatattttatttgttggcaggttttgaaatggagtattattataatttgcttcccataaaggatagttagataatctgccgtctagattgctaatgaagctactatatgtgtatatacctatatccatattacttactttcttgaattcggctataaatcttaaagcataatccataatgtcaaatcctgtagcttctatatctaacattggcttcaaatcgtttcttttatcctttatactattataaaaattatcggcttgagtttctggagcacttgtcccaactaagaagtgatagaaaccaacctttaatccagctgatgaagccccattataattagcctgtaaatacggatctataaaagttgttccttcagttgcttttatatacactaattgaactccacttgcttttactgaattaaaatctatgtacccatcataattactaatatctataccataatatttgcttaaagtgttcccactactgcttgaaccagaagaactttgacctggagtgcttccactactacttgatccagtagaactttgatttgacgcacttccgctgccacttggtccagaagtattctgacttgaatcttcatacctcttaccatcagatccaatcttatatccatctttagtagtgttagtaagcatttttcctgtatctttatctaagtaataccacgctccattaagataagcccatcctgttgccatacttccatcattattaaagtaataccaattattatttatagtaatccatccagtttccatatctccgctatcagtaaatttgtatgttgtaccgtctatcttattaataccagttaccatacttccatcaatctttaaatagtaccatttattattattcttgatccatccaatatggatttttccacctttatcgaagtaataccatttatcatttattttattccatccactattggttgccatgactcctgaatctttgaaatagtacaaatttgaaccatcattctgaattccagttgccatagctcctgaatcagttaagaaataccaatcaccatctaactgtttccatccttttaccatagctccactttcatccatgtaataccagttgcctttgtcttttacccatccggttttcattttaccgtcatcttcatttaaatagtaccaattattatctggtctaatccatccaatcgcttttgtattatctgacttataataataccaaactccactctcattcttccaaccaatatttgatgtcatattagtatcactagttgcagcttgtacatttaatcctggaattaaaattagtaccattaatacagataatactgtgagtctctttttaatattcaaaacaacctgtcactcccttttttattttttagctaaaatataattaaattgaatacgaagttaattttatgcttctataagattctttccatctatagcaatgcttccatccttgtaatattgcattactctcttaacataatcctgaaccccttgtgacatcttacatagatcatcatctgataagaccccatctttttttacattttgtggtccagcattataagctgctattgctatttttacatcaccattaaattggtttagatattcttttagtaattttgaccccccatcgatattttgctctatatcatatccgtctgtcattccaagatatgtataattctgaggcataatctgcatcaatccagtggcgcctgagcttgacgttgcttttggatcaaaatctgactctgctttaattatagctagtatcaattttgaatctagttcatatttatttgccgaatcatttactgagttatatatttttttcatagtatcacctgaccccttcgagccagtgcttaaaggaattgtattaagtggcttatatctttttccatccgatccaatcttatatccatctatggtagtatccgttagcatttttcctgaagtagcatctaaatagtaataatcgcttccatttgatgtaacccatcctgttgccattgatccattatcatttaggtaataccatactccatcaagatttatccaccctgtcgcaacacttctatcagtattgaaataataccagttattgttcacattaacccatccagtttccatctcaccagtatcactaaacacatatgttgtgtttcctattttatcagtaccagttaccatacttccatcatcgtttgagtaataccacttatcattattctcaacccatccagtatgtatctttccatctttatcaaaatagtaccatttatcatttatcttagtccatccagtatttgtagccataacccctgaatctttgaaataatataaattagaattatcctgctgaattccagttgctctagcacccgaatcagttaaaagataccagtcaccatctaactgtttccatccttttaccataaccccattatcatccatatagtaccagtttcctttatcctctaaccatccagttgtcattttaccactatcttcatctaaatgataccaattattatccggtttaatccatccaattgcttttgtgttgtcagacttataataataccaagatccattttcatttttccaaccgatacttgatgttatatttgtatcagtaacatcagcttgtacatttaatgttggaataaaacttagcgcaattaatgctgataaaactgtaagtacttttttaatattcaaagtaatccatcacttccttttaactgattcttaataaaaaatgttattagactaaataactaatactgattttaaaaagttaaatctaatattaaaatttatcattaaaaatcagtattaattatgtattttataatttattaatgttccttattatttttaaaataatttttttcaatgatggcttccgaaactttgaattcatcttttagatgctttacttctttttcatcttttgggtttcctacaatttgaccttcatttaaaattgtagcatctctattcgtattcactaatactcttcctattgaattattctcaaattcacttctatcctcgccaagcaagtataatattgtcggtttaaaatctgtttgaccaccagctgttgatataacttctgattttaagttctttgaataaatcatataaggaatctttctttgattatccttccaccaatctccttctaaaggcgcattttctatatcttgttcataaaatttatgaacaccacaatgatcaccgtaaatcataactaccgtattatccaataaaccttcctcatctaattctgctataaactttccgatagcctcatcagtatatcttacagattgaaaatactttcccaacatattatcatcaagttctttaggtaggtttaaatattttttattttctggcatctcaaaagggccgtgacttgtcaacgtagtcataaatgcataataaggttgtttttcatcttttaacttttgagctacttgctttaaatatgattcatctgaaagtcccaaacctataatttcatcctgattaaactttcctacatctaatattttatcagccccatagcttttatgcatttctgtccaattccaatttccaggtggttctgcatgagtagaaactgtagaatatcctttaccttctaaaatattttgaagtgtattatattgactccaaggataagaatatactgtagtaccttctcttatagggagtactgatgcattaaccatcaaatcacaatctgaacttgttccagaattattttgttcacgtatattattaaaatacaagctatttgacaataacttatttaaatttggtgttatttcttgtccatacactttttgattgatgacaaagttctccaaagactctacttgtagtgcaattacattttttcctttaaacattcccttgtaactattgtcaggtaaatcttctttattatcgttaaaccaactttctatttcttttttctcttcatctgttaaagttttatttttatttttatttttatagaactcaatatcaaaaccatgatatccaagtgggctcatatctccaaaagtctgaaatggcgcccaggacaatctaaatacatttttcccttgacccatttgcttgacatctactgtataataaccaagccatataacaagtgcacttgcgataaatacatacaaggtctttgctaccctaaaatatgcttgactttcattcgcttctttaactttaataaacttatgtattaagaagagcattacaaagtcaatgataaatactaaatccactattctaaaattaaataaacttttgccttccggattaaatatctcagtatgcattaaatgtcttatagataaaaaagtttcatttgagcgataataccagatatctgcaacaaaaagtattgtcactaaaatatctattattaaggcagcgctaagcctccccctttctttaaaaagaaatattggactgcatatcaatactattattgctatatgcacccaaagtactggactatcaaaataagcacttcctaaacttatacttgatgagtctggtgtccttagcatagataatagcaatgttgatttagcttgtaacattgctaccataaatataaataaccaattttttcgaactaaatttttcattctttcttttgtttccattttcattctccattaatatccatttttcttcctacattataactcaaactttatcttttaccaatataattttattaaaagataattacaatattttaatatcaatatgaatctcaattaaattataaatcattactactaattatcataagtttaaaattacttattattattaaatatttaataatttccttaatttatcggcacctaacagcttaattaatcaaagtttatcttaaaatatcaagtaatgcgattaaatagctttataattaataaattacactagaacctatataatatcaacccggaatcatttacatattaagataaaaaaaggataaaagctacttgtgcaaattcctgatttacatcaaaattgcatacttttatccaaaataaaacttataatttaaataaactatattagtatatctaacatgtcccttctttttttatattcctaatgctccacaattaaaatttctccattgaaataaatttagtttttcaatgattgcaacaaagaactcttctattcatcttttaagcatccataaatttcatctaaattatatctcatcgattccaaatagctcttatcatcttctttagattctaatgttaatattggtactacttttgcacctacttcttttgctaaagtttccgaaaccttaggacttgcaagtgattctgaaaaaacagtttttatattactttctttacaaaagctgaccaagtcttctaattgttttggtgttggttcaccttcagcaaatagattttctactgatttctgtgtcaacccaaaatctctacataagtatccaaaagcagcatgccctgttataaagttctttttatttaatgcttcaaatttaggtttgtattcaccatatagactttctaattcacctttgaatttgctgtagtttccctcgtaataatccttattcttctcatccaatttcacaagagtattttttatattttcagattgtatttctgcattttttaagcttaaccagctatgaggatcaatagcatcctcttcttttctagattctacacctgtgctcgaatctacgacaggtatatttttatctttaattacatcattaaccttatctatccaactttccattccaagtccattatagataaacgcatcacttttagttaatccttcaaggtcttgagccttcggatcatattcatggggttccacgttatttggaactaagcaagtaacctctgccttatctccagctatttcttctgtaaactcttttaatggatagattgaaactgtaatttttaatttatcatcttttgtgcctttcgtattttcagtcgtagtttttgtattagttccgcaacctattagcataacaccagttagtagcgctaaaattcctgaaataattttctttttcatatctgcacctccacatgcatacgatttgcatttgcatttaataatattacgcttaacatttaaatatgtcaataatatctaaaatctaatattaattattattattcataaatcttgctatattgcatatatggtactagttattacatttttcattataaaaaaatgtatccctctaaaatcaacattaggcttttctttctaattgccgtaatatattttataaaaaaattgagcataatacttttattaaatgtttcattagaaaccacaataaaagtattatgctcatttcagtaattctatatttaaatatagtttatattaaagttcttctccattactttctattactttcttataccaataaaaactcttttttcttgatctacttaagtctccatttccatcattatctttattaacataaataaatccatatctttttttcatttctccagttgatgcactaactaaatcaatacatccccaaggagtatatcctattaattctactccatcattaactgcttctttcatctcttcaatatgtgctcttaaataatcaattctatattcatcattaactgatctatcttcttcaactttatccacagcacctaaaccattttccacaaccattaaaggaatttgatatctattataaatattatttaatgtccatcttaatcctttagggtcaatttgccatccccaatcacttgctttaagatatggattctttacacctccaagtatatttccagatgttctttctaattctggatctgtgcttgaacagtttgacatataataactaaatgtatagaaatctacacaaccttcctttagaatttgctcatcattttcttccatctttatttctatattattctctctaaaaaatctctttgcaaaaccaggataagctcctcttacttgaacatcagagcataagaaattgttcaaattatctctttcttgagctaaaagtatatcttccggattacatgtataaggatatgttgtcatatatgcaatcatacatcctatcttgaaatttttattaatttcatgtccaagtttaacagcttttgcgcttgcaatgaattggtgatgaagagcttgaaatcttatttgtctactatcatcgatctctttattaaattcaagttcaccacctttatccaataaaattccgccacccataaatgtaccaaatggcattgttaaacaatttatttcgttgaatgtaagccagtattttacgacatctttatatctattaaatattgtgttgcagtatctaacataacaatcaataacttctctacttgaccatccattatactttttagttaacccaaaaggtgtttcatagtgagatattgtgactaatggctcaatgttgtatttctttaattctgcaaaaacatcatcatagaattttaatccttcttcatttggttctaactcatcaccattcggaaaaattctagtccagtttattgacattctaaaagttttaaatcccatttcagcaaataacttaatatcttctctataatgatgataaaaatctattgcttcatgacttggataatatgttccttcttctaattccggtgttattcttcttgacgtagtatgagtgccccctgtcataacatctgcagtactaaggccctttccaccttctttatatccaccctcaaattggtttgcagctgttgctcctccccataagaaatcttttggtaaacttctaaatttattattcattttaatcactcccacttatctctttaatagtgctcctagaaatgaactattcataattaagaattatggatagttctgcaaaaacatttaaactttgattatattaagttaatacatatttcctttaaatcatttgtttattacttattatcttctaatttctctattatatctttaaattgtggcaaatgttttttatgtgctaataacatttcatttaatagttcctttgcaatttgtccacttggaactaatggatttattgtaaatgcatgaagagctttgttgtagttccctgtaactgctgctgaaattgttgtttcttccattcccttcattatttgaaccatacctcttggtgctgggtcaaactttccaaaattaatcggttctggtccatgagacgtgattgtacttgaaacttctactatagagtcatatggaagatcctctaatgcgccattattctttgtgctaactaccatagttgttctcttgtcattgtagattgaagcaattaattcacaggcagcatcgctgtagtgagttccacctctcttagtcaattgttctggtttatagtcaagctttggatctttatatagttcaaacaattctgcctctgttctttttacaacctctgctctagtttcaccttttgagtaactttcaagttcttccttcaacatatcatctgtaatatagtaatacctatgatatggacaaggtaatattcccaagtctttaatctgctcatagttaaacttgatatctttaatattggcaactcctgcatctttcttttcttctgctaataatggattgtacaatttttcaattacttctgcagttttttcattaccttctttatcccatactctatgccaatggaaatgatttaatccagcaaacttaaagaataattcacttgaaggaactccaagcatctttgcatcatcttctatacagttgattggaacattgcatagtccaacagttctgtcccatccgccatattttatagctgcttcagtcaccattcctgatggatttgtgaagttaacaagccatgcactagggcataactctctcatatcgtctattatgtctaatattactggaattgttctaaatgctttaaacattccaccagcaccgttagtctcttgtccaattattccatggcttaaaggaattctttcatcctttattcttgcatctaaaagtcctactctaaattgagtcgacacaaaatcagcatccttaagggcctctctcctatctaaagttaaattaactttccaatccaaccctgctgccttaaccattctttgagccattgctccaactatttctaacttctcttttccatcttcaatatctacaagccatatttctttaataggcaattcatctttcctttttataaaaccttcaattaattcaggagtgtaacttgatcctccaccaatagtaactattttgattttttcttttttcattacttatttcctcccttgatctcgcctcaggcaaatttttaatttaagatattttcctaatctgaaaattacttggatataaaatacaagagctacttttttataaaatatatataagtaatcctttacctaaaagatatcacaccaaaaagtaaaataccttattttttcggttttagtgacacatgctactatttagttatttgtttttttataaaacagtttgtttcataatatagctaatctaactacttactaggaatcaataagcaaagtaatgggaatattatacctaaacaaatttcagtaatatttaatatatatgttgcaattcacaatgcacatttcacaattacacctaaaattcttgcaatacttttataattatgatgaagaattatttttgcaatatatatataacataaaattaatagataataagagttataatgaatttattctcaccatgaattcttttccacaagaaactgatttgaatcgaatttttaatagattattatatcttacatactttaatcaatcttaaaataattataaaaagaaggtgtactatggcaaaacaaatattgttattagataatgttcataaatctataaaaaataaagaaattgttaaaggcattaccttttcaattaatgaaggtgaggttttaggttttcttggaccaaatggtgctggaaagtctaccactttaagaatgattgtcggcctttcttcccctactagtggaaaaattttaatcgatggctattcaattactaaggattatgttaaggctatgtctaaagttggatgtattatagaaggtccagatatgtataattatttaagtggtttagaaaatttgaagatgcttgcttctatgaataaaaatattactaataaagatataacgagagtaattgaacttgtaggaatgcagaatagaataaatgagaaagtgtctacttattctttgggaatgaaacaaaggttaggacttgcgcaagctcttattcataagccaaagcttcttatattagatgagcctacaaatggacttgatccttcaggaataaatgagtttagacatattattaaagatcttgctaaaaaagaaaatattgctgttctcgtttctagccatttgatatctgaggttgaattaatgtgtgatactgttgcaataataaaaagtggtactttactaaaatacgcttcagtctctgaacttataagtgataaagaagtttcctttgttctaagtgataattcaaagggaattaaaatattaaaagacaagtggaatattgatagttcactaataaacaatacgataatagcaaaagttgatgtatcaaaaattgaaaaaattaattcttcgtttatcgaagaaggaatagcaataaagttcgtaagtgtaaatcagaaaactttggaggatctgtttttatcacttacagaaagtaactctattgttagttaaggaggtgtatatattgctagtattagttaaaaatgaaattaataaaatattatataagcgaaaactcctacttattagtgctataatcctaattttagtttcactttttgcatacggccaaaattatcaatatcaaaacactttgaataagtatttaaagacaactactcaaagtggcgatatcccttggcagtcattacaaaagcaacaaatccaggacctaaaaaataggcttaatagacctgatacccctgacgaaagtaagccctcaattaatattcaaattcagcaaaaccagtattatttagataacaacataaatccaattactccaagtgctgcaaaattttcagttaagctaatggaacagtccatatctgtattactacctttactaataattctattggctggggatagcgtatgtggagaattttctgctaaaactataaaagtactgctaacaagagctgttcctcgatggaagatattacttagtaaatatatagcacttctaatcatgttttctatagtaattctagagatggctctattttcaattttaatttctggtttattttttaataactggggatttaatgagcctgtagctacaggttttagctctgcttctggaaccttagatgtttccaatgtaatcaaagtaaccgaattgcaatatttaattctcgtatactctcttggatggtttgtatcaattgtcatcggtacaatttcatttatgatttcagttttagtaagaaatacagctacttccataggtataatgatggctacattagttgggggaggctttcttagattgtttctaaatgattggccttcaataaagtacttttttgccatcaatctaaacttacctcagtatcttacaggatcatatactccaataagtggaatgtcattaatttttagcactttagtacttctagcttgggccataggtgccttcattgttagttttgttgtatttttaaaacaagatgtattagtttaaaaaggagggatttaaaatgtttaaaaatataaaatggaaatttattttattgctatccatagtttccaccataaccttagttaccggatttatatcagcattatcaataagttctcgccctcctaaagagatatcagataaggaatctgaacaacctaagagtgaagaattagatcaaaattattacaacatattagttcttggtgactcccttgctaaaggaactggagatgaaaaaggacttggcttttcaggctatttttcagaatactggaaaactaaagtttcaaaggagattaaaataaataatcttgccataaacggggatgtatctaatgggcttttaaatgtagttcaagagtcacaaacattagctgacattaaaggatcaaacatgatatttatatctataggtggcaatgaaataagtaagcttaaaaatacagatataagctcatccacaacaaagataaaagatattcaagataattatttagctaatctaaaatctatttttaatataataaggatcaataatccgtcatctatggtagttttcattggcttgtataacccatttggaaaagatcttacatctgataaggtaagcatattaaatgaatggaattatcaaagtcagcaacttttatcattagattcaaatgcgatttttattccaacatatgatcttttcaaatacaacttacaagattatctagctgctgataattttcatccaaatagcaccggttatcaagctatttctgacagaataattgaatctttaaaaaattataaataatatactataataaagctgcccagtctgataaatattttctgactagagcagcttcataatatactataaaaaatttatgctagcttgatatcaacttctaaaggagatattccaacaagctgaatgcttctactatctggttgtgatataccaacaaataatttgaaccttttgctatctaatatcctttctccatcatcatttaccacttcaaatgatgatttcttgattttcatttttgcaatcttgctttctcctattttcaacctaacacgtttaaatcctgctaaactatgattcctaacagcatatttagattcaagatcttttatataacattgtatgacttcttctatatcaaaatttcctgtattagttatctttacgctcacctctacatcctcaaaatcactttttacatctggtacatgcaattccgataattttacagtagaataagttaatccatagccaaatggatataagctttcacaagacatatagcgatatgtcctatctttcattgaataatctataaattctggtagatccttagtatttctataaaatgtaataggtaattttccacttggagaacactttccaaatattaagtcagccaccgctctgccacctctgcttccaggataccaagcatctaatatagctgaacacttatcctctgcattattaaatgtcaatgcacttcctgcgccaataactaatataacaggtgtacctgtttctattattttctctaataattcttgctgccttcctggtaaatttaagcttgctttatcaccagctccttcactattacctgcatctccttgctcaccttcaattgtagaatctaatccgaggcataggattgcaacatctgatctttctgctattgatattgcttcttttaatctatcattaggttctgctaattcttcaactctgtctctaaataaatgacaaccttcagaataatatactcttacatcttctcctacggcttcatgtattccctccaacacagttatatatctagatgcagttcctgaataattacctttaagcatgatctgactatcagcattagggccaataacagcaattgattttaagttatttttatttaatggtaatattccattattctttaataaaaccattgaatttctagctgcttttaatgataattcattatgttctttacaatcatttaactcatatggtattttgttatattcacactcttcatcaaacattcccaatcttattcttgttgccattaatctttctgctgctgttgttatatcttcttctgttactaatccctctttataggcaagcaataattgaagatacacattaccacaatttaaatcacatccatttttcatagctaatgctgctgattctgttgcagtgcttgtcactctatgatgcaaatgaaaatcagcaattgcccaacaatcggatactacatgacctttaaagttccattttcctcttaatatgtctcttaataaagttttacttccacaacaaggctcaccatttgtacgattatacgcccccattactgcctctacatcaccttctttgacacaagcttcaaaagcagggaggtaagtctcatataaatcctttttacttacaactgcatcaaattcatgccttaatccttctggtccactatgaacagcgaaatgttttgcacatgctgccgcttttaaatatttgccttctccttgaagtccttttacaaaggccacgcccaatctagatgttaaatatggatcttcaccgtaggtttcatgaccacgaccccatctaggatctctaaaaatattaacatttggtgaccaaaaagttattcccttatagatgtctctatcatcttttttgctgttttcattatactttgctctgccttctgttgagataacttttgcaatgtaattcaataactcatcatcaaacatagcagctaatcctatggcttgtggaaatactgttgctgtacctgctctcgctactccatgcaatccctcattccaccaattatatctaggtacatttaatctttttacagctgatgatttataagttaattgttctgctttttcttctagcgtcattttccctactaattcttttgctttttctaacgcatattcatgagtaattcttttttcctcgaccatattacacatctcctaaaataatcataatatttattctaactttttttaattataagactaaacaactaatgtattaaaagaatgtggatgaatattaaagctataatcttcaccattaacactaaatgtaacttcttgtaattcatcaaatggatttaataattctaatacaacacttccatctggattttcaaaagccagagcatttcctgcaaagtccccttttaagcctttcattgttgctccttgttttatatatttcgaaaaatgtctcattagataatactctgggttatatttaacatcattatcttttgtcaccgtaataagtgaattttgtttccatccccaagtgcttattccctcttcttcaagtaccatattccaataggtataggcgtttactccatttataaagtatgtccacattaaattgaatacatattcagcatattcccagctattttttccttctccacattcattttctgtctgtatcaatttcatttctgggtaagcaattcttgtctgcagcaaagcatgctttcctccccactgatacccaacgccatttatatatctttttgcatctttatcacttagtacagtgttagcaaaattattatactgaccaaattgccaattttcatctccataatcatcataaggagaatttaatgttccaagccatatctcagcatcaagtttattctcttcaaataatggcccgatgtattcttttataaaatcacgtaattgttttcctgaccaaacacatgatggaaacttctgatctgctataggttcattttgtatgtgcacctgattaatcttaataccctctttttggtattcttcaataaattttttaaagtaaagagcatatgcttttagatttttctcctcccatattaatgttccgaaattgtatacctccggaaacttcatccaagtgggcgggctccatggagaagcaaataaattaagctccccactatatttttctgcttctttaatataaggaatcaagcattctttgtctctttcaatgctaaaatttttcatttcataatcgcccttagtttcatttagactataccagctttctgaataatcatttgctccaattggcaatctgcaataagtaaaattacactcctctggatcaaatagatttctaagcacctcttctttcttatcatttggaatcttttttaatgctatatatcctaactcattaaaacatccaccaaatccatcaatagtttgataagattctccatttaactctaatgtatggtatgatttatctttactaatatctatagtactacttactaagctatcagtctttgttgttgaaatcaaagttgctttcctcattataacttcctcctttttctctaaattcagttggtgacattcctgtctgttttttaaaagctaaagaaaaataatttgtatccttatatcccactaaagttgctattttacctgttttcatactagttgtttctaatagagatttagccttctgtattcgtttacgtataatgtagttattacagccttctcccgtactatgtttaaacagctttgaaaaataggttggagttaaataaagcatttccgctatactatatactgaaatgtcttcatttaaatggtcattaatatattgttttgcttttcttataatttcatggctttctccaatatcagtctgaagtatttgtattatgaaatctcgtgtaattctcaaggcatcacttctactacaattttttaatgaaattaataaagaatttaacttattatctgatatatctcctttttccattgcgtaggaaaaatatattcctcctccaatatcaaaacatgttttcttaactaatgatgtcgataaattataaaactctatggcctctgaataagcctcataaatactcattactttctcaaggtcatctatattatctatcatattcttcttaaattcctgaactctctcgttaaataaagtcaaacgcatttctctaggttctttcgttatgattttcccatatgtgctcttattatttaataaaacacatgcgtcgttatatgaaatattgatcttattaaatcctcctacaacgcttccaataatcactttaggattaatatcatactcatttttcaaatattcaattaaatgttgtactcttaatgttacttcttctaactcttctcttataaatatggcgattactatgtttttatttttgtcctcaaatgtaatcccttgtttcttagaatcaaataattcaatgcaaatatttttaatagataaatttaataattcaaaatgttgtttccaagctaaattatcatctataattggacataccaaagcaatttgaagcatctcttccttatcataagaatactccctcaatacttttttaaattcacttgtcttcactcgttcataaagtaaattttgcataatctgttcaagctttaattgttctgttacaccttgtatcctgctatttatcttttgctcatggcttaaagttttctcatgctctaaatcttctattaatcttccgatagcattctcaagttctatctcatctactggctttaagagataatcctccacctgcatcttgcagcatttttgagcatattcaaaattatcatatcctgttaaaacaataatttttaacctaggatttagataattcatcttttctactaaagataatccattcatctcagtcatacatatatctgtaatcatgatatcaaatgcttcttcttccatgatttttaaagcttcaattcctgaggatgccattttaacagtatctatcttgagtttctcccaaggaatcacactacatattccttttctaatcatttcctcatcatctacaactatagctttatacattaattattctctcctttaggtaatataatatctaccgtagttccaccatgttcatttttcttgtagtataatccatacccactaccaaataatatttcaattcgcttatgaacattccttaagccatatccagttttttcatcaaatactgatatagagctatttatttcatcaatttgttcttgtctcattccaactccattatcagcaactgatataactatcttgttatttatttctcttgcggtaactaatatcttacctttatacccatctttcacccttattccatgataaatggaattttctattaaaggttgaagtgtaagcttgggtattagtacatttttgaaattctcatctacatttatttcacactcagcaatgccactatatctcatattttgtatgatcaaataattttctacattttctagttcttgcgaaataggaataacatctttccctctacttagacataatctataataattagctaacgctttcaccatttttgatacatctttatttccatcagataaagcctgccaatgtatacactctagtgtgttatataaaaaatgtggtttaatttgagattgcagtctgtttaattcgatttgcttaatctcagattgctccttttttatcctatacataagtatattaatttcttcaatcatgatattaaagccacttgctagttgcctaaaatctttgccatcataatcatgttccattctaacttcgagatttcccatcgaaacctctctcatctttcttacaatgtcatccattggcttatataagttattgcttaatttatagcaagctatactaattaatactccggcacctattactaaagctattattaaaattattactgcattggtatcccttaacattgaccttgtgggtatctcaccaaccatataccaatcccaattatcaagcttctcataaataaccatcttatcttcaactttttgttggccactttttccttgtaatacgcttttataaggactttctgttccaatcagagatttatcctcattagatataataactccatctttatctgttaaatatgtttgtacttttaaccctttatccaaattagagtaaaattcttttatacttttttctccaattcctattactaaaaatccagtatatttattaaaattgtatttatcattgatcggttgatatatatttagtacatattgatctggataaaatacttttttcttcatgcttatcttacagttaccaaactttgtgcctatagcatcttgatagtcttttaaagtttgagtcctgaaatcgctgcttgtccaagactctccaacatatattaactctggaccatcaaatttcaccaatccaatataatctatataactgtttgtattcaagagatatcttactgacgaatatgcatcacttgtatctttgttataattctttgaagtcaacctattattcattaagaattctttaaccctactgtctcctgtaatcatattcgatgtctcaataatattttttaatgttatatttaaaatatccgttattgtttcaaactgtccttgcactaatccactggatttttcagtaatttgctttcctgctaattgataaacagcaaaaattacaaaactattagtaattaagactgccaatataaaaaatgtagtaatcttctgattaaatttcattttagatagcttatttataacttttctcaattccttatacatacctgtatccctttttgtaattcttatatataagaattaatacccaccataaatatattattaacctttgacagctcctgccatcataccctttattaatttatcttgtccaaaaataaatgctatgatcattggtaacatagaaatagttaataccgacataatcattggaacattcattgtatattgaccttgatattcccaaatagcaagtggtaatgttctattaggtaatgtttgagttaaaactaatgcaaaactgaattcattccatatagcaacaccattataaattgctaaagttgctagccctggcttcactaatggaagcataacatttgaaaagattttatatttattgcacccatctatctcagctgcttcttctaattccctaggaattgcctgcataaatgtaactaatataaatactgagattggcaaattaaaagccacatatgggcctattaatgcccaaggactatcatacaatcccatcttagtagtcatcaaaaatattggaagtagtgttacgtgaactggtactgacatgcatgctactattatagcatatattggtttatttagcttaaatttgaatctagataatggataagatgcacatgcacttaagaatagtaaaattactagcgacactataagtactaatatactgtttttaaagtaaataaacatgtttcctttgaatacgtcaatgaaattctttaaatataaactttttggtaaatcgaatacacttcccataagcatctcaaattgctgtttgaatcctgctaataacataaatataaaaggaactattgtaattaaaagccatgctattgctagtattccaacgatagcttttatagataatttttttattaatgaattctgcttcataatagtcaatcttcctttctatttaatgttttaattgtgattaatgatattattgttataagaataaacattcctgaagcaattgctgaaccatatcccattctttgagataaaaacgcattcttatacatataagttgccataagttctgacgcgttacctggtcctccacctgtcataacatatataagatcaaaatattttaatgatccaaccattgataatacaattgcacttttaatagctggtttcataagtggaagtgctattttccaaaaatactgacttttttttgctccatcaattattgctgcttcatataaatctgatggtattccactatatgcagccaaaaaatacaccatatagaagggaataaattgccagcaaatagctattgtgatggttaatagtgctgtcttagggttacctaataagtctactgaatgcccacctaataactttgatattcctgatactataccagaatttgcatctaatgcgtacttaaataaataaccaattgcaacagatgacattaacattggtataaaccaaattactttaaatatattaaattttttcccaccaaaatctaaaaatgttgcaagagcaagacctattggtaattggacagctatagatagaaccataataacaatattatttagaaacgcttttctaaaaatttggtcagcaataagttctttccagttatttaatcctacaaataccttatttgatgcaaatccattccaattatagcaacttaaattaaaagagtagacaattggatatgctatatatattattaagaataaaaatgctggcacaagaaatataattgctgcatttctcgttgacgcggcacgtcttttagctaaactattagtttgtgattgcactttttctctctctcctttatataattattgagctgttacaaaattaattccaccacataagttcaacttctgcatttaacttataatataaacatatttacatctctgatatatcttatttatactcttttttcagaaatcataaatattttgcgccctctcactaaaagataagctataccacaagtctaagtttgcagttgtttatatataatagaatttttattttgcaacagcttttacattattttttaaatgctgctataattatttattttttgccttatatgaatccatagcagattgtagttccttatctgcatcttgtggagtcttagttaaaccaaatatttcttgacaagttgatttgtgtacttctgcaacttctgctggtaagtattggtcataccataattgaactccttttgcttggttaactgtgtctaggattttttgtgttaatgcatcgtctggtttgaaatctttaagtggaataatcttacctaatttcttacgatcttgtaatgcttgatcatctaataaagattgaattaatttaaaagcaccttctttgtctttacatgtttctgaaattgaatataagttatctccaactgttcctgcacaaagtgattgatcttcttttgaaccgtctaatgctgggaatgggaagaatcctaatttactcataaagtctggattttcaccaagtactgtacctgtaaaccatgagcccattaaatccatagctgcatcacctttgtataatgcttgtctagcttgaccactatcatcatccataccattaaatccatctataaagtaaccttttttaacccaatcttgaattttgcttccagcaaattcaaatgcagggttttcaaattttccttttcctgatgctgcatctgcgaatgcatttaacccaccaaaacgagttgctaagtacatataatacatagatcctgtccattttgtagcattagctaaagcaaatggcgctactccgtttgcttttaacttatcacatgcagcttctaattcagaaatagtttttggctcttgtattccatatttagcaaaaacatctttgttatagaagaaacctgctacggatacgttttcaactggaacggcataaatttttccattgtatgaacattgattaattccagcatctataaatttatctttgtagttatctttgttcatgaattctgtaagatcagcaattttatttgaatttacataatcaattaatcctgatcctccccattgaataaatacatctggagtctgatttgaactcattgccatagataatttctgtttgtaggaatcattaacctgatcaacaacttctacatcatattgtgggttagcttccataaaccttttaactgatgccttaattgcatctgctgctgttgatgtttggatatgccataatgtcaattttgtctttcctgaagcagatccaccgcttgtctgtgaagtgctgtttccgcagccaatcattgatgcagaaaccatagttactgtcattatgattgatgctatccttttcaaattcttattcatatacctttctaccccctagaattttcatatatttgatatacttatatattagcattgataacgtttaataaaaattgaataatttgtcttttagatataattttatatcctattgtaatttttctttattaaacgcataaataacctccattttaaatagttctctaaaatactatctaaataatgaaggcatttatatttttattcatatattaaatttttataaattgaggctgaaagctggaggggaacctgccttcagcctttgaaatatattatctcaaaaacaaagatagataaaaaaactgccaagaatatttatctataaccctttgattctggtaaatatccaatactatttgaaaggattttcagttttgtaaagcataccttttggttgattgaatccaacttctttaacacctaaatatctaaataagttgtaaactgcttttccaaagtgtccaaatgcaactgctccatgatgaggatatcttccttctactaatacgtgacgatagaatcttcccatttcaggaattgcaaatactcctatagctccaaacgaacgagttgcaactggtaatacttcaccttctgctacataagctgtaagttctgcatctgcattactttgtaatctgaagaatgtaatatctcctggtactatgtctccttcaagtgttcctctagttatatttggttcttgatttggttcaagagctcttgccataatcatttggtttttcattgttccacatgttaatttacaagctgctgtattaccgcagtggaatgccataaatgtatcatttaatgaatagttaaattttcctttaacttctgattcatacatatcagctggaactgtattgtttatatcaagtaatgttacaacatcttggcttatgcaagttccgatgtattcacttaacgcaccataaatatcaacttcacatgatactgggattcccatagctgttagacggctgtttacataacatggtacaaatccaaattgtgtttggaatgaaggccagcatttatttgcaaatacaatgtattctcttgaacctttatgttcttccatccagtctaataatgtaatttcatattgagcaagctttggtaagataccaggcattttatttccttcacctaattctttttccatgctagctataacgtctggaattcttggatcatctttatgctcattaaatgcagcaaataaatctagttctgagttttcttctatttcaacacctaaattatataattgtttaataggcgcattacaagctaagaaatcttgaggtcttggaccaaaagaaattatctttaagttctttaatcctagtaatgcagtagcaactggtacaaattcagaaatcattcctgcaacttctggagctgttcctactggatattctggaatatatgctttaatgtttcttagagctaaattgtagcttgcatttaacattccgcaatatgcatctccacgtccgcctattaaattatctccgctttcttctgaagcagctgcaaacataactggtccatcaaattctttagcaagtaaagtttctgaagtttcaggaccaaagtttcctaaatatacaaccaatgcgtttactccagcttctttaacttcagctaaagcttttctcatatctttttcattttcaacagttgtttgacattcaaaaatttctccattaaaagcttctactactgcttttcttctatttgctgataattccattgggaaacaatctctacttactgcaacaattcctaattttacttgtggtatattattcatttttaactcctccattttttatgaattttaaatctttataatcagatcttgataaattttacgaagtatattattcgatattttaatgctacaaattagatttattaagttaggtattaattaatatcctattcctaaataattgaatctagctattattttacatagcctgtccgagttttaaatttaactttagtacttgttaatgtttcactttaaatatattttaaaataactttttaaatgttgtttgataagtctataataaagcttttatattaattagtcaatacttttttgtatacattttcataattaatttttctaatagttatatactgtaaaatgcataaatttttatctatttattcaattgctgtaatatgtaaactttgatataataatatatgttaatgttttcactttgaatttagtaggagtgattcggtatgaataaaattaaaaaagcttttaataaagataaacaatccttcataagtaaatcattcaaattaaacgaaaaattcagaaactattctataagtaaaaaaatagatacaacctttaattttatacttatatttacactattgagtatggttatatctataggtgtactactatcattatctgctagaactttttctctatataatggtccttatcatatttctcaagcattatccgatattaggcttgcatttcaggtttccgatacaaatatttctagagccgtaatagaaaatagtcctaaaaataaggaagactttataagaaattccgatgaagctcttgaagaactaaccagtaagatggatttattgaagcaaaatacgagtgataaatctgctattgatcaacttactaaaaatttaagtattgctgatacctatagaaaagaactatgcaattctatcaaaaataatgatcctaaaagtacaataacttctaagttggatacatatagctttcaaatagatattgttgaaaattatatttctcaattatacgaatcttctaaaggaaatgcacaaacatttgtaaatgaatccattttttatagaaatttagctaccgtaattcttgttttaataattatatttttaatactcattccaagatttctaggtaaaactttaaaatcttctatatttgaaggaataaataatgtaaaaaaagtttctacaaatttatcaaatggagtattaaacatagacaatgaatattcttcaaaagatgaaatgggtgatatgttcaatgatttgaagaaatctatagatatgctgaaattatatattaaagatataacatatacattagaggaattatcaaatagaaatttagatattaacaaaatggaatcagttcattacattggggattttgcgccaatacaaaaatctttagatgaaattatagccaacttaaattctagctttttagatatagataaatcaattgattttactgcaaatagtgcgaaagaaatttcttcaattacaaaggtactttccgagggagcttctaatcaagctagtgcagtgcaagaacttcagggaaactttaatataatacttgatcaagtaaaaaagaatacaaataactctgaaaaagcttataattattacaatgaaacaacaaagattgttgctgatggaaataataaaatgaaacaattaatggaatctataaacgagattgctactgcttccaatgaaatctcagcaattataaatacaattcagtcaatatctgaacaaactaacttattagctttaaatgcagctatagaagctgccagagcaggcgatgctggaaagggtttcgccgttgttgctgatgaggtacgaaaattagctgaacaatcctctaattctgttaaaaatattactcaaataataaagaactcattaaacactgtatctaaaggcgaattgatagcaaatgaaactggtatagccttaaatagcattgtcgaaaatgttgaatttacttcagagttagtaaaggaaatagctactgcttctgaagagcaaacaagtgcaatatcaaaaatgactttaaaagtggatattatatcagatattgtccaaactaatctagcaacagcagaggaaacatcagcatctattgaagaattagcatctcactcacaaattatgcatgagcaaatttctgaattcaaattacaacattgatataaataagcctccatataaatagtctttgaaaataactattttatatggaggctatttattatagcaaaagtaataataatttagctttaattaaattacgactattaatttttaaaaatgttcttgatttaatctatattaaatttcaattttatgcattttttgctgcctgttcatttttaaagtttaaagcatcttgtttcttaaagaatgggtagtaaataacaaatgatattgccataattactaattgcaataacgccattttccatccacctaatataagtcctgctattattggtggtgttgtccatggaactaatactccagtaaataatggaactaaccctgtatacattgcaaaataagtaattaaccctgtaaccattggagtaagtataaatggtattgccataaatggattcattactattggtgttccaaatgaaactggttcatttatattgaaaaatcctggtactatagctaatttacctaattctttgctttgtgctgattttgcaaacaataacatacatattacaagtcctattgttacacctgaacctgtcataccaatcatattgtctagaaattgttgtgttactatatgaccgccattagctactgtgagtgcttttccactattaactatagcttgattttccattgcatttgatgttagtattcctgtcattataccacttataattgatgatccatgtactccaaaccaccataagaatgggattataaatgtcataacaataactccacctagagaatctgtcattccttgtaatggtgtttgtattaacttatatattagttctataaatgttgtattcattccatacttaagaatactataaagtattgttgctccaagtactataactgctgctggtattaatgatgcaaatgagtttgcaaccccttgtggtacaccagctggcattttaattgtaatcttccttttcatgaaccatgagtaaattgcgcctacaactaagccaataataattgctgtaaccattccttttccaccagcaaattctttactaataacatcgcttactttttctccacccttagttatcacataagaattagttgttaataaaaatactacaaatgatattattcctgcagatagaggttcatgtccctcgtttttcgcatatgtatatgctatacctattgccgcaataaatgcaattattgaaaatgtcgctccataagcttgaaataatggctctgtccatcctggtccaagctgactagccatccaatcgttaaatggctgatatggtatttgtgcaagtaataaaaatactgatcctaccataataaaaggtaatgtaaataaaataccgtcttttaatgctataacaccttttaggttaacaaacttcataactactggtataaccttttcatttagggtatttccaattgacataatgattcctccttaattaaatataatatgatagtcagaatatataataataaatatgttgggcttattattatcttttatattaaagttacaactttccatatagcctactaatatcttaaataactatatagaactttgtacaataattcagttttacattatatttttctatataaattcagttattatttattagctaaatttagtgcaaattctagcacttttgctccattcatcattccataatcaaccattggtattacatccactggaattccaagcggttcacatatcttttttgcttttcctaatgtatatccaacttgtggtcctagtagcgcaacgtttacattatctatatgtttatccatttgtccttctggaaaagcttctatatctacttctacacctttgaccttagctgcatccttcattttactaactaaaagacttgttgacattcctgctgcgcaaaataatctaattttcatcatagttgattcctccttaaatatatatagtttattaaaatatgaattatagttgttgatcaattaaatttatatctcttttattgttttactaatgtatttataattttccttaattccattatttgttcaattaaattcttttcagttattgctgtcattaaatgatcttgtgcatgtacaaataaaaccgatatatcaactttttctccattagcttctttatgaagaaacattgtctgaccttcatgagctttagctaatgcatcatttgctaattgcatttctttttcagcttcctcataatttccttcgtttacactattaagagccatataagcatgatttttgcagtctccagcgtttattataatattcatgattgctaattctaattcttccatttcgctctctccttttaatactttttgtttttatactttatataattttgttttgtttctcttatgcttatatataaagcaataaccgtgccaagtttttgatgcagaaataaaaatgtgatcatgagttcaatcgtagcatttatgcacttttgaggataataaaacactttaaaaacaattattatgtgttttactttttcacaatttttttaaaacaaatggtcaatgtgttttattttgtgtatttattatatgttttatcccctaaatttttagctattatagattcaataaaatattttgtactaaataataaaacttggtttattattttaaacaaaaaaaaatataaatatctataaagtaagattactagttatcccacagaatagatatttatatatttcttatttttccatgattcatttattaaatgttattactatcaaagaatgtcatcaaataacatatttcatcatctgaaatattaattgaatactttgtatttataggtgcacatgcatttttcacaattttatataaatttaaattattttttatatactcctcttttccttcaaattccaaggtaactttaccttccttatatctatctattacacaagccatatgaagtgtgattccaattagaatattaatctttatattaacctttaattcttcagtaacagttctgttgaatttctttatactctttagtaccattattccatcaacattttttaaatcacgctctaaagtttcctccatttttatatatgtttcttctgcatcaataaggttttgtatatcattagcagaatctccatctataatattatctagcgaaaactgcggactatttacatctaactcaaaaggtccgacaaaacaaataatttcgtatttatttcttaatttttctattctttcatatacattttctttgcctataaaatttataggcacaatttctattacctttttatcaaaagctagatttcgttccaatatccccttaatagtcttagctccaccttcaccagttgtacatactgttactattgctaatcttttatctttttcgttttccttataatctatatctgcaacattatcatcatataaactattaacatctagtgtttctctatatatttcgtctaaagaatatcccatcatagattttcttgttgcttctaatgcatgcaaagtgctgactaatggtatcgttctggtttttatattaaatatgttttctacttcttttccaaaagtcgtaagtgatcccatatccactaaaaataatatatccgatttaattttttgttctctaatgtatcctatagttttctctaatatcttttcaggtttttcttctatgggtgcattaatacccgcagtattttctgttccaagcagactattaactgcttcagccattgatgtcgcagtactaatgccgtgggcgattattattatcttcacatcattttgtgtatatcttaagtttctataattataacttaagaacatagctatgaacccggcttcatcaattggcatacttatatcaattgatctctctatcatcttcaaagcatctaaagccacactaaattcttttttattttcctctctaatactgcttaatttaggattaacaatttttttatttctccttattctatctattgagttactaatatgaactgctaacccataacttatttttttatctagctttattcccagttcttcttcgcagaataaaataatctcctcgattatatccataacatccttgtctacgatattttttatattagtcatatcaactttagcactaaaatcattaatatattttttaaaataatcttcaatatctttctctatttcttcctctagatgttctccttttattccctttgctttaagttcatttgtccttaaatctaacatctcatagatattgctatcattagtaccttcttcaaatatctccctatcttcatccttatcaaatattagatatctcttatttatatcaatcaatttgttccataactgtctatgttctatctctttatataaaccttcccttatatatagcggtaaatctatactatttatctttattacatcttttctattcgacagaaaatcaacatatgctttagcacaagctaattgtatatcagatcttaactgccctacattgttctcacaattatatgataaaaaagcttttattgagtttactgacaccttaatactttttccaagtcttcctgactcttcaatcataaattgttttattagattgaatcgttcttccattcctctattctttaatgatggtattgttataaccataggaattcttcgagtaaatgtctttagcaatgtagtatttggatcctctgtagtagccgttattataagaacacttgcacttctttcactttctgtttctccaagccttctatatacccctctatccataaatgtaaagaacatctcttgcccttctgccggcaatctatgaacctcatcaagaaataaaattcctccattagctttctctagcaaaccaaccttgtcaaaatccgccccagtataagcacctttttttactccgaataattgcccaagtaataactgaggattatttgcataatctgcacaattaaatgttataaaaggactatctttaggtttcacattcatttcaatggcatatttatagattagtcctgcaaaggtcgatttaccaactcctgtttccccaagtaataatatattcattccatttggcggatacaatattgcggcttttgcttgctctactgctgaatatagactagggttagcttccgaaaacttatttatgactgataaattcgaggtaacgttttcctcatctattgcaataaatagtgtcggctttccctttatctttactgctttcccatcacttactaatttatttaaatcattgcttacatttgctctgctaaggtttaactcctccgcaatttctaatgcagaaattccgtttggaaacaaatcttttatttctcttaactttgcaagaattaattcaattcttttcatctcattaatcccccctattaacttaaaatatttttgcatacactacttaacttaaaatatataaagcgagactctatacatagtaatataataacatactatttattagcctcgcctgctttatcaatgacaataataatatttgtttgtaatagtccaattacaaattatcttatagcctttttactttattgtaaatacctaccttaagcaattaaattaagctcatacatttacataaaatgaacataatttgattagcgtttatcttcactctcctactaatccgctttccctcatcctattaacaaatttttctgacttcttattcatcttttcttttaaaaatacagcaataattattgatatgaaaaaatatatagataaaattccaatattgtaatataaggaactccaaataattccacccactgcctctctcattcctcctatggcatatgtaaaaggaagcattgggcttatattttgaaaaaatttaggtgtaagctgtattggaaaagttcctcctgatgctgaaacttgaagtaccattataattaaagctaaagccttacccacattcccaaatacggataccaaagtgtatataatcattataaaaattatacttacatacatagaaaatattaaaagtattactggacttacagaataagttttaataaaaaacaaattccctaaaacaatgataatagcttggagtagtgaaagcgttccaagagttaggaacctgccaaaaaacatttttgtggttcctaaattcttcacatcatccaatggctctacatggacagatagtatagaaagtaatgtaaatccacctacccatatagcaagagtactgtaaaatggagccatagctgatccataattaggtataggaaataccctattttgaactggctcaattggatttgccagaaaatcacttacatccttagtatttttctgtagaaaacctgtgagttcgttgaatttttcatcattactcaaacttttaaatttttcaacattactgtggatagtctcctcagtttttggaaatttatctttaatatttttaatctgttctgctcctaaatcagtaccaatattagcgtcttttagcagactatttattaagggtatattattttttgcactttctaaaagcgttagtgagttgtttgccatatttgttgtattgttcacaagactatttattgctggcgaaatcgtgctgtcaaaattatttattgaatcatcaataagttgtgatattttatctattccttgtattagagattctactgtatctgaagaaattttattaccattacttaatgtagttatcaaagaatctaaatttaatttattttgaaccaattgatccctaatattttgcattttatttatgaaattagatattgcactactatgtaaaatattatttacagactgaagtatatttatatcgttattaacagcagatagtgcattattcattttagttgaagctgattttagaatctcctgctgccccttaacatctgtatcaatggaattattaatgctgctaagtgcatctcttgttgcagcagaattagcctttactgtagctaaatctgttctaacatacggagatatattttttattgtgtcattaaccttagaaaaaaagtcattactggattgaacagcattttgagcgttgttcagtgaatttgttatattaggtatattcccttgaatattttgtataaagttatttagatctactgccccattgtaagcattatttatgccttcaccaatttgaggcaggttattatctatgtcatttataatattcataagttcttctagctgaggcttaattttctcaagttcaataccataagcattcatataattaagcacagtactgcttacttcttctgtaacagaactagttatttcattttgtaaactcgttaatccactttttgttattttaggtgctatagcattaattttttcgttaacagaataaataagtttagcttttttaggttcaccatttgctgcaactgagagaagattacttgaaaaatcctcaggtatagttatactagcataatacttaccatactttaccccactttctgcttcatcatcattaacaaaagtccatccaatactttcattaccttttagcttatctattacctctctacctatattaatttctaggttttgaaattgagcaccttcatcattatttactactgctactaaaagccctttggtgttcccatatggatcccaagaagctattatattaatccatgcatataaagcaggtacgaaaagtaaccctactattataatcatcagaggaatattagttgttatttttcttatatcccttttgtaaattttaaatattgtactcataacttttgcataccttccttcttgaacttaatgttaaggcacaattaaacaatacaagtataataatgctaagtttatgttctccattaaagtattaaataattcaaaagcacttttatgattttactactacaactcaacaatagattccaatcaaaaataatactgatgagaactatcccaccagtaattttattatgcatataactaattttcttcaaaaatgcaataattatttttacctttactttttgctaagtagactgctttatccgcatttataaagagttccttaaaactattaccatgctccggatattttgctattcctatgcttccagaaactttttgacttaaaacttcatcagtattattacttctaaaaccattcattagagcttttgctttttcaattaatgactcttctgatgtaatatttttaaggaatatcacaaattcatctccacctattcgtcctacgatagaatcttctttgaatatctctgaaaacattagtgaaatatcggttaaaacaaaatcccctgctagatgacctaagttatcatttacagctttaaaattatcaagatctacaacaaataatgcaccactatcatcgtccttagcatttttcacatattcttcaatcatattttgtactgttcctttattatacagactagttaaactatctctttgtgccttaaataagagtttttcattttctctcttttcttcatcaatatcaataattatccctatagccttaaatatatctccattttcatcaaacatggcagttattcttattttgcaccaaatatattcattagtatttttctttattctaatttcagcttctttatatgtatccccatatataatatcattaagcaattttccaaaattctttatatcatcattataaatataatctgttttatatataatctcactaacattctctacaactgatttatagctaaacttattttcccaatttccagaaaaataaactatgtcttttggaatattccattcgaaaattgcatcttctgtttgagacataattatacgatagcgctcctcactcattctaagctcttcttgagttatttttgattcagttatatttattactacgctatagctaaataatttaccatagctattttctactatttgaccgttatctaataaccatacattgactccatcactccttttaaccctgtattctacagtgtacttaccatatttacttatttgttctcttatctccctcattactctttctctatcagcctcgcaaattaattcaattaattttttacgtctttgattttcagtatattcagcttctttgtaacctaaaatacttagacatccactacttacaaaatctaaaatatattctccattttctattttgcacgtatatacccctcctggtatatttgatgttagagattgtagccttctatttttttcttctatatgctttttatttttttctatagtatccatcaacccattaaatgctgttgctatttctccaaattcatcctccttgttatatataaatcgatcatccatattaccttgttttatttttctaattacatctaatagtttatatataggcttagagaaataattaactataaataaatatgatactgttattaacaatgaaataattataaaaaatgccacggtattctttatagttctctcagttggtgtcttaaattctgataattcaattgcacttaatactatccagccagtattactaatccttgaataatatcctatcttttcagtgttattaattttatattcgattattccattaggtgtactatcaaaatctattttttcccactgctcgtacaaattattggaaacatttatcttttttatattttcttttatattattactagttccagctgcaacaacgccattttgatccattattagtattcttccagtatcaaaaaagctaacatcgtttacaagttcttcaaaataattcatatttattatattagctataaaaccttggtatttaccttctaaaaatataggacttgcaattatcgcacttttagcgccattattaaaatcttctctttctataatattcgttataacaacttcgttttgcttaagcttctcaacttcattattagaaatcataacctttttatttatgaaatcactatcaccacatgcaataattagaccctctttgccaacaagtatctctctgcttaaaaaaaactctccttgttttctgccagctaagatttcatttagaacttgtatatcatgacttttagcttctatatcttccttattatttaacgcagttaataattccttgaccactggtatattggtatcgttattaagattgctaatattctcatcaaaaaaagcttttaaatgtatagattgatccttggaaaatgtttcaacattctgcttagttaattctaaatttctagaattaaaatttgaaatacatatacttgtcgaaataattgcaggaattattccccataatatagagaaaactataaactttcttctaatattcatctttcacctcattaatatatcattaatagacaaattatatattaattttatcagattttataattattttatatatattatattaattattgtgtttttttgtagttataaacaaattaatatcaatatttcattcttctttatcatttaatcattatttcgaaacgttctatatcagaattttgcaacttagactattgctctatagcaaaaaagaatacacacctcatatttcatgattagagattttggttttaataaaaccttaagcacaataaaagtttatgtgccttattcctaaccactcagtatgagttgtgcatttcatatatttaaactttaaaatatattattgccttttattctacgattacaccagtattattcatttttttattaatacaaatatataatcattagcctctaatatatttattaattgtagctgctccttcttcatttgcatgataataaactcttaagttgcctgcctcatccatatcaaaccttgtttcttctaaaagtccattagcttctgctgtcattagagctgaaattacagcatctcttttaagggctttaaatttaccatactcaccttttagagcttcaataacgtcttctgcacaagcttcaggtactttagtaaagtattttaaaatagcataattaagtggtttcatactatcttacctccttttttctgaataaatcaagcggattcattgcaattactaatataccaactatcattagtactgctgctccccaagcgattggaggtagagaccatccatctattccaaagattacaccaagtaatatccaacagcaaaatggtccccagaatgaatatgtaccattacaagccataccaagtgcagcaccacacatactatttcctttataccatgtcataaatgaaataaatgcacaaaggccacttgcagcaaaccaaatcatagcagaaccacttgtaaatgcttgagccacaagtcctgctgaaatattaactccacctgctatcatccctaaaataggaatgaatataattaaatttgaaagacctgctgttgcctgacgaatggtaatacctatttctgaatcaatcatagatgtaccatagccagctacacaaccttcaaaaccccatccaagagccgcgatgaaagcaatgcaaatacctaatagcataccttttggtgcatcccctgtaatacctgtacttccgatcataaaacttgcacaaacgcaaatagcaatacccaatatcatacgtttatttaattcctgcttgaataaaattctgcctaaaatagcgccaatagctggacaaagagcagtaataggaataactattgagcctgccatctgaagcccaataacataagctgtgctagcaataggtcctcctataagagctgctaacatcattacacgacctggagtagtattaatacatcttaagaaatccccaaacttacctttaataattgcataaatcaccgcccatacagcgctgcaaacatcatttactgcacttccaagtgcccctaataaatacgtaataacaaaagctgataaaccagccgaatttactcccgtccaatctccccaaactcctttagtcatacccaaagttagaaatgctgagtagaatccatacatgagacctgaaaataaagctattgtaatgccctttttaaaaaattgtgccgataatttcctttttgcaataaccgcagcttcattaactgtggtattttttataatattttgcatcaaaaatctcccccttaaatataacttcttattcgtataattttagcattttctaccttacaataattttcttgaactaaattatttccttatactatataataaacaaaatgaatatatcttaaacttatttatgtcttagcatcaagttcattttgtgaacaaaattatattatcattgttcatcgttcaaatcaatatgttcacacaaaaaaatattataaattttcataaaaagctttaaattgatttattcccattcatatttaaatacttaataaaaaatcatgcctttgaaagcgctatatctttaacattttacatgtcaattcccaacagcactaacaaacgcatgattctaacttaagagctatataataaataatatcctcttaatttcttattcaattctaattatcttttaagcttgaatttcaaaagtaatttgtctgccagctcaaaaaatacctgatccttagtaaatataagaattccagcatatattaagccacatgcaaaaacctccactacgcatccaaaaagtatgttatgtataacaagctttattccaaacgttataggaatgaatatcaaagaataatagaaatactttatattctcgtaagcgaacaaatgtatatctaattttataactttcttaaccagcctatattctaaacctattacaataagatttgctaaaagagttgtacttatagcagtaaccatattaaatgttcctgttagaaataatgttgtattaaaaattaaattaagtattcctccaattaatactaacattgcatcatacttttcttttccgtgaagatatattatttgattcgctattaccccttcaactccaacactcaacatatggattgaaaatataaccataaccggaactgctgctaaaaattctggtcctccaaagatatatatagcctctttagaaaggcacaaaagacctatagatgctggaaataaaatcagaaaatatatctttataaccctttttagtaagaccaaatactcacctttagattcatttcccaagtaattagagagccttggcatagtaacttggataactgttaatagtagtgtacttactatagtagttaccctctgagccatataataatatccaacatcggtagtccctccaatactgtcttttagcataatcttatcaagctgagtatataaaactcctgtattagaaagaattacaacgtaaaacataggttttaaatgtctaaaaaattcaagattagaaaaatcaaaccttacttttctttttacgtatacgaaacttattatattatttataaagttaaatcctataactaaatataaataaaacaaataatcttcttgttttctaacaaatagcaaaatcaatgcagaatatactattctaactatcattgttttaatagcaatgaaatcataattttctaatgcttcattaacccattccacgtaaaaaagattaaataccaaattaaatcccataactatacatgtataaaaatatggttcatttttataaaaaatagctacaaatatcatgtatgcagctgaagctaggatattagtaacacttgcaaaaagaaacaagctcgtaaacgtttgtctaagtttagccttgtcatcacgaactttacttatttctcttagtccatactggtaaattccaaagcttgcgaatattaaaaaataagcagttagagaatctccatatcccatataaccatataattctttaccaactgatctagtaactaatggaattaccaaaatcggcaatattatgttaaataagttaagcattgctttgaatatcgcattttttgaaatagatttagccatttgtttgccctccatatacgtattctcatcaacaatgcacatttaatgacctttgagcgcactgtgataaattagaaattattttattaaaatgcacagttccaattgaatttatttctacttaacaagttattgacttcgcttcgcactttttatatcagtttttagcgcttcccgcttttttataagttcttagttgcgcttcgcgctttttttatatgtgtatatttttcgctttttcaattgtacattctagtttattcgttgtcaattcatatagaaattctatggaaagtgttgaaaatttatggacttcttccttattttgagttataatcaaactaacgattgttagttttaaattataagataataatagtggaatattatgcttatttttcaaactctaattataatttatatgtatttgtgtttgatatatattaatataaattaagcactttaaagttatgcaataatatttttgtgaggagtttttatgaatacaagagaaaaaattatatctgaatcattaaatcttttttcaaggaaaggttttgatgcaatatctgttagagatatcgccaaagcagttggcataaaagcaagttctctttataatcacttcaaaaataagcaagatatttttgatactataatccaaaaatattcagatctagtaaataaatttttgaacagtataaaaattagggataattctgatgagaatcttcctaataaaacaaatttgttatctgacgagtactttttcaaaaaaagttcatacatttttaatttttacttagaagacgagaatatgattaaattcagaaaattgctgacaatagagcaatgcaacaactctaaactttcagatttatataataagatatttattgatgatatattagattttcaagctgacgtattttcaaaattaataagttcaaacgtatttataaaaaaagacccttatacattagcacttcaattctactccccagttttcttactattttataagcacgaaaacttaactgacaaagaacgtagattcttagaaaatcatatttcagaatttaaagacacatatatagtgaaaggatgatcacttgtgaatgtaattgtcatttatgataactcaagcgagacaaatacatataattgtgtgcaactcttgctaaatgctcttaaacttaatattgaattaaaagtcacggaatttttcttatcaaaggattatatttacaatggacgtctttcttatcccgatattgattcaaaaactgttaatggtatggagtacatcataaattcattagatagctctgatttacttataatagcttctccagtatcaaaatgtgatattagcaatgaaatgaaactgtttttgcacagactatcttgttgttacctattaagtagctcaagatcccaaataaatgataaaataggattgtccatgtcaacaacttctggtgctggtcttttttatacatctaaaattctaaagagaaatcttaattcattgggaataaagaacactttaaagttttgtagaactctttatgagataagttgggaagatgtgagtttaaaaactaaaatgagaatacataaggatattttcaaactttcctacaaaatattaggcctacataatcgtacatacaataagaaaagattaattttaagaaaagtgattttttcaaaagataataacgctcttatagatagcagcccaaatattatacaattaagttcctggaaatatcaatctcacttgcataatagacatattcagtagccttttaaacatatatttttacataaaaaactacacaaaaatatacctttatcaaaataagtatattttagtgtagtttttcatatttccatattatattttgcttttatatcattaaattataatttaagtgcgtttttcagatatgctagatcctccaatgaatctatttcaaatatatcatttgattgtatcttttcgatatgcacttccatgtccttaagattatctactgcaatactatcccaatataaatctctaaagtctcctttgtttattgcttcttcaactttattagaaataaattcgccatctttagcagtccaaaaagatgctcctgacattataaaatcaggtttatctccttcttttccaatttcaacactatgtattctgccatcttcatcatatttcaaaatccactcgcctattatattttctttacaagctgaataatataatgatgttttcggtttactcttaggtaagaaattccttgtaatatagttatctgcatcaattacaaatgcatccctaaggtattgcctaactaaatacatagtatatatattattatagatatcgtatttatcattaactactttgattaaattatatttcttaactatatcatcaaacttttcatggagatatccagttaatactataatctcgttaatcccaatctcctttaaatttattatttgcctttcaagtaaagacatcccattaacttctattaaagattttggagtattttcagttaatggtcttaatcttgttcccatgcccgctgccattaaaatcgctctcatatctaccttctcctcagctaattaaaaatatagaaatcatcttaaatttcaatacatataaataaacaagttatatcctaggcttatgtgatatctaaccagaattataaatttgatttataattaaagtttatttaaatattccttagctctattatatctatctaatccataagtaccaaaatcgtctccttctgcttccttgatcaatgtccaaacagcccataagaaatcttggcatatttgatgaattaataatcttcttcttgaatctttatcagcatcttttcctttaaaatataatctaaacattaactctatatcatcttctgaaaattcattttctaaagaaagagctgccaaatcccacatatcatcgttgatcccactgtattcccagtcgattaaataaattctgcctgcagtatccttaacaaagttttccgaaaccaaatcattatgagatggtacatagactctgttgcatctatttaattcttcttcaagagccataaccttttctcttacttcagcataatcctcaaaaaagtttccattatcttttgttaaaatcccttcatatttttcaagttccctaaacatactgaactcattatccatatgaaaatcagtacattcatgcaagtctcttaagatagctgtaacttgctttaagttttcttctttcttaatacttctatgagttaaagtttcagcattttctataaacttagatattttaactccagtttcaagattgaaataaggtacttctacattatagcctttctcagaagcaatcgccgaattaaacatttctgtgtttctattaatcatttgttccgttccaacacctgcgactcttaatatgtatctatcacctttaacacatattttataatttttgtttgtcataccacctgctggctcaatttctgtaatatcttcatctgttacttttaatgattctctaacaatagcttttatgttacttatctcataacttagctctcttcttcttatagttggataaagataattcttgattttttcatattccttagaactatctgcatcgccccatgcaagatcatctattttaacaaaaccaatattataatttctagcaacatctaaaagtacatattcataatttaaatacggatttacattccctttaaattcttcaagcatcattgtatataatttatgtgatatcttagtaagtcctatcatttctccatcaattctattaaattgatgaatatctttagacattttaaataaatgattatcccttatttcaacaaatgcttcatcacctgatccactttcatttgtaaaaagaatacaatcacgatttggactttctgctaattccttaatagctcttttttcgaaaatcaaatcattttcaataagtaaaaaatcatcgtctatataatctttagctaaagataatgaatgcattgttcctgtccacttataagtatcgctctttactaatattatatttttactatttttaaaagcttcttcatagtactgactttcatatccagttactataacggtcttagttattccattttcttttaaaatatttagagttctatcaataagcctaaagtcttcaatatccaacattcctacaggtttcccaaattcctctgccttacctgctgcaagtattacagcttgtttaactatttttttctcttcttcatgaatctttaatctagtactttttgcagaagcaatattttcttctaaaaacttcatgcccttttcagttactttatataaagttcctctattatttgttattctgtcaataaatccatccatggtaaattcttttaaaactgcattaaccttcccaagggatatattagttcttttagccaattctctttgattaatattaaaattatcattcagcgtctttaaaatttctatcctatcttctaacatattacacctaactcccctttaattaaacatagcatttattgttcgaattttgaactataattattatattccctaaaattccagttgtcaataaaaactcccttgtatatttctaccccaaagttagcctctatatgatacttgtttaaaatcaaatacatttgttttaatttgaactcttaatatttaaaaaaagcactaagaggaaagctaaactcacttttcgcttgcctaaatctttaatcagacaagcgaaaattgaaaagcctcccctcttagtgccttttgtatataaatttctaaatccctactatacagtacatatttgatttgtaaatatgaccttacatccatcaatcataaatcattggaaactgtagaaatagcataatctctatttcgataagctatatgtataattagaaatcatagcttaaaaactataaatatttttagtacatagctccatcttgtccaaatttatatacaccatcatcaatatacatactttgatttacaaccatttgtccattcggagtaaagtaataccattttccatttaaatttaaccagccttttttcattactccatttaaccccaagtaataccagctattatttaaattcatccatccttttctcatctctccggttgttggatccaggtaatatgtctgaccagtcttatcatcaaccttccaacctgatgctctgtatcctaaattatttaggtagtagtactttccgccagtagatacccatgcatttttaacttgtctgctttttttatcaaagtatactggtttcccatttactgttccccattcatcatacttagttaaatctacccaacaatcattgtaatcatcgtaaaattgatcatcatcattgccactatcattattattatcatcgttattccaatcagaagagtcaactctgtaaacttctaaagtataagttttagtctccttgccatcttcagatataacctctatatcaatctccgttttctgagctcctttaaggctaacacttattgcagaatctgaatattcctctccattaacactaattgttgatttggaatcttctgctattggagttacattaatcttagatacattttgatcaactcgaactttagttatatcttctttaggatcaaatgtatagtctccttggctaagaataacatttttcaaattcgcattactaccttttgaattgttcttaattacaatgctatatgttttactagttttcccatcttgtgctgttacaactatggttatagttgtattcccatttgtatttaaaggaatttcatttgattctccagaagttaaatcataagttgcatcacttccattaatacttgcagtaattgacttaacattatcatcttcagctattgctgttatcttttcagttgtatcttcttttgctaccgtagttgtataatctaatttgtcacttgagaatccagaattaccatcactatcggttaaagtatagcctgaaatctttaatgaatttaatgaagcattacttgaacttgcccctggatctggtgtcacttcacctgtaaaattttccggaagataaaacacatagctatcccctacagtataagtacctgttatttcctttacatcctggccgttctcatctttctttgtttctactttatcgtagtaggcttgaacaaccattttctttctactatgagcaatattcacattaaggctagtacttcttacaagatccttatcaggtgtattattcactgattcagtggcctcctcaagattagtactatttacatcatccgcaaaaaatacttttatatattcatgcttatcactttgatgccccgtaaaagaaactataactgaatttgcattaggtgatccataatacaaatcataactacgcctagatgaagtaaaactaacttccccattattcgctttagttactcctggttgtgttaacaccacatcactattactatctgtagttttactaaattctaaattcattgtaaagttattatcattatttataacaacgacatctaatagatatctcgctaatatctgtgatgaattggttatatttccatctttcccctcataggcatctatctgtatctgattataatctgagctcgtatcaaaattaacatattgttttccatttttgagctgcgactgttcagttttagtcttccctgatgaatctttataattattggtcacagtatatgctacattgttactggattgagatcttattaacgtaggatttatacttatcattcctgcccttgaatctacgtatatttttcctttatattctgaaaaaccagacgtagtttttgtgacagtaaacgcctttccaatatacgctttaacatcatcatcgtcattaaaatcaagctttgttatacctgcattttttaagctataatctttctctgcatctaatttattgtatctaatttctactgcatatgccttcgctatctttacagtagagctactgtcattagtaactgagtttaccttaattactattaaatctgacttacttcgatttgataaatctccagataatttctgtccattaagactgaaacttccatcaacagcacgtataccatttttatataattcaacacctttatctaaattaatcatatctccaaaagtcatgatatattttaatgctgaaagtgaatctggcacatcaaaattatatcttaatttcatattaggatctggtgtcaccgtagtcgaatataaaaatggcactgtattattttcattttttgtggcatctaaaatctcatctttatcattaaatgcatctgcatcaccaacataagctttaaatgtcatttcacttatttggttagttgcataatccttaccattctctattgttattgttttttcatattttgtaactgtcttttctccagctggatccggagttgcatcttgtgttacagttccgtcagaatttttagtttctttatatattattgacaaagttgttattttaactgaatatttaattttattaacacctgctggtaaccctgttatctttacccctattctttctgaatcattttctacaggagttggcccaccatttccagtgctgttactataacttagagttatccccatccctgctacagcattttgtccatctgcatttgcagtcccatcatcattgattagtatagcttcatttatagccttaacaactatttcctgctttgtaactccggtaattgatgattttgaatctttcgcctgctgtatcaattcagcttgagtcttttgaatatttttaagagatatatcgaaattatcctcaagagaattagcagtatgtatctcttcctgagtattactatctattctacttggaagaggtgtcatagttccatctaaattcactctgctggctgtagcttctgcaggtatatcatcagcttttgccacttctgaattaaatccaagtggtataagtgatattatgcttgtaaataccactattagagctataaacctttttttaatcttgctcattattctcgtcctccttaaattgtgctttaaattcaaaatttagtttatatatagccgctcgcctatttatctcatcatattaagacatatcttagaattatattaaataaaaaatatctaaattcatataaatcccttatgtgttaatatgttataataaattactattattttactaattttaaatacattccattatttattatcgaatcatttccttgtgcctttagacatttatatcctttatatgaatgtattaaggcgtattcattaaatttacctaaaaatcatataatataaaataatgaataatcttatattaatatctaaataaaaaataaccctccataatataatacagcagttatatattatggaaggtacttttattaaacttctataatcttattcatattccctaagtgaaacactttatgattttcctttaaacgaactattacatttcggacatgtaatagaaatttttccttttcctcttggcactcttaatttttgcttacaatttgagcaagtataatatttatagttttttaatgtttttattctatttatattattcttgaaccacattactattttatttttaatttttaaatacttataattctcatttcttctcttatatatatttcttgaaaatatcctaaacatacatataataacaggaatatatgctaatattgttaaaaatcttaaatcctttggtacgaaattcattatcaacagtagtataaaagataaaacaagtaatgctttagataattcatctccaccatatcttccaaacataaatcttcttaacctatccatggacttcacctctcttgaattctattaatataaaatatagtataattaataagatctatcaacatttatattattaataatccattaatcttttatgatatacattcgtaatcaaatcctgcaaaattttacaacctattagtttaaatatgaactcacttctttactgtaagtattattataagaaataatacaatataccaaatattatatcagtatattgtattaaaacttttctcactatatttttatagctattaaattgccaattctgttcagcagtaaaatcatttaaattattgttgaaactgcattagcaattgctgttgcttctacatcttgatatgatgaatctgcacattttttagcttcatttgtatttgttataaatcctaattcgactaaaacagctggcattgtagtatttctgcatacaaataaattaccatctttagcacctctatttatggcacctgtgctatttgtaagagatgatgctatggatgaagctatattcatgcttttagaaagcctatcgtaactatatcccccgccaaaactttcatcttgtgattttgagctgtaataaacttcaactcctcttgcagattctgcatcagctgaattgtgatgcaaacttataaatagatcagcctttgaattatttgctatattaactctattagtaaggctttgattaactcctaatacttctctatcagatgatttcctagtcattattactgtgtatccatttgcttcaagcttttcttttagcttatccgcaacttgcatatttaaatctctttcggaatatgtaataccatcattggttgaataagcgccatcatcaccaccaaagttatgtccaggatctataactatgactttaccatttgtgcttccaggcattctatctcctctttttccatcttcacctatctgccatccatttacaactgtattcttagccattgcccctgaaacaggtaatagataataataagcatttccagataaaatccagcctgttgccatagtaccattacttcttaaatagtaccatgttccattaagctgaagccaatttgtcgccataactccattggaatacaaatagtaccagcttccatctggtttaacccatccagtcagcatacttccatcaccattgaaataataccattgtccactaattgaaacccatccagtcttcattgctccacttgaatctaaaaaatatttcctaccatcaatcaagttaaatccagtaatcatacttccatctccttgaagatagtaccacttattgctatcctttatccatccaagctgcattgctccacttgatttaaagtaataccattttcctcttaaaaggctccagccttttgccatacttccatcactatataagtaataccagttaccatcaggcttaatccacccagtaactttagatccatctgagttgtagtagtaccaatttccattttcaaatctccaacctattgatgaagaaataccgttactaccatccggcgatgctgggattggcttggttgcttccattccagttggaactgttgtatttgtttgaggctcatcagttcctacagttttgcctgagtcgttatcactaccagaatttttagaagtgtcattatctgattttgatacaattcctgctgagactaataaatcattatataattgattaacctcttctccatatgtaagacttggagcccactttccacctaaagcatttaccgttactactgtaccttttatggtaataaaatcccttgggtcatatgaaccactccttggatatccatctacacctgcataaagtgctagatggtctaaatgagcttgaacaccttcatcccatgtgttgaatttttgatgagcatttggatcattatccaatccaccagcacttattttcaatccacatggattatggtagctttcatttataactcctccaaatttaccatagcctgtttcctttgcagcttgcacatatgccacagctggattaacatttccatgctctggcgaatacttccaatataactttgccagattaataaacgcatctgttgcaccttttgatttagcccattgttcagcctgttttgctgttactttcgtctctgatactatcttaatatcagtgatagcagcttttacgctagtaataggaattaatattaaaactatcacaaaagcaaaaaataatgtagtcgatctcttaatagccttcaaaacagctttcccccgttctatttagttctaaagaacaaaaattatatagacaaattttccctaaaagtagtttgcctattatatagtacaagcttttattctattttaggtactaatatatccaattatatggcactatcttaaggaaaattatcgaatataatcataaacttagcaacaaggctacataaatttacattttttatattctttaaatataaaattcgctaaatattagtcttactaataataaatgcttttactaaaaccaacgactttgctaatacatactctgataaatagataaaagccttgaaatgttattgaataacacttcaaagcttttatttaatacttatctactgtaaattttgtaattatactatacatattgatggtatgaactcaactatatccaactttagttttctccctggaccttagttaatttaatacaattacattctaaatattatcagcgataacttctgctattgcttgagccacctttttctgactggctggatcagcgcatcttgctgcttcttctttatttgttataaatccaacttcgactaaaactgctggtatattggtatttctacatacaaataaattttgttcctgtccacctctattatttaagccaagcttattagcaatattgttatttataagagttgccatttgcttacttctttctattctattgctatctagttttcccccaaacttagagtcttgggattctgaactataaagagtcagaacgcctttcgctgtctccccagctgaattatgatgtacgcttataaagaaatctgcattagcattatttgcaacatcaaccctatgagtaagactcgcaactaatgagccatatgaaggctgctcaccaagatttctcgtcattatcacattatatcctctattttgaagttctatctttaacttatctgcaacttgcatatttagaactgtttcactgtaagtaactccatcaatagtgctttcagcaccgtaatctttgccataatcatgtcctggatctattactatagtctttttaccatttgaagaattacttcctgctgaagggctatttcccgaattatcttcatcgtcttgatctgttggagtattatttcctgaactatcttcatcattttgattagatgaagcctgctttttcccatcagagccaatcttaaatccatctattgttgtattagtaaccattcttcctgttgaagtatctaggtaatacgaatctccattagatgtaacccatcctgtcgccattgtaccactgtcttttaaataataccacgctccaccaagattaatccatcctttcgccatagctccggtttcatacaaataatagtaagttccattatcaataatccatcctgatgccatgctgccatctgtattaaagtaataccagtaattgttcaatttcatccaaccagtagtcatggttccgttatcattaaacatatacttcttattgtctatatttttaagaccagttaccatgcttccatcgccttgaagataataccacttagcattttccttgaaccatccagtttttatctttccacttttctcaaagtaataccacttattatttatctttgtccaaccattataagtagccatagctccagaatcatttagataatataatcctgatccatcaaattgaaatccagtttccatgacacctgaatcctttagtaaataccagttattatctacttgcctccaaccttttgccatagcacctgatttatctatatagtaccatgttccattatcttttatccagccagttgtcattttaccatcttcatcatttaagtaataccaatttttatctggtttaatccaaccgactgctttggtagtatctgatttgtagtaataccaagctccattctcatacttccaaccaatatttgatgttatactaacactattgtctacagtatcatttgagctttgaggtttattctctgtaataatatcagatgcatttggtgcgctaggcttactttcaggagttgctggatttggtgacgcatttgatggttgattatctggagttttaccattatcttttggataatctattccagcataatccattaaatttttgtataatgcattaacttcttctccatatgtagcactaggtgcccactttccacccaaagaatttaccgtagttgctttacccttaattgtcacaaaatgtcttggatcatacgtatcttttcttggatacccatctgctcctgcatatagagccaaatgatccaaatgtgcttgtacaccttcatcccaactttcaaatttttgatgtgcatttttatcagtatcgcctccaccagatggatttttaagtccacatggattgtgataactttcatctagaacaccaccaaaattaccatatccagtctcttttgctgcttgtacatatgcgattgctggatttacatcaccatgttctgatgcgtatttgaagtagagatctgctaaatcagcaaaagtatctgttgctcctttagatttagcccaactttttgcttgctttgcagtaaccttactttctgaaattattttaaaatcagtagttgcagcttgtgcacttaatcctggaattaaacttaatacaactgcaaatgccaaagcaaatgttgtaaatttctttttaatattcaaaacagtgtgccacctccttacatttgattttaacaaaaaacgtcatggcattaaaggcaaatttgaaaaaatgtggacttttttagaataaaaccacagttattgttttttatcaataaatttcatagctttaatcaatttttaatatgtaaatgtgttaattaattacaatcatatatctgttttatagtaaaattatatctagagttctaataaaacacattatcagatatgcttagaatatataagctgaattataatgtatatatatcttcaaacaaaaatattttattgcacataattaaaagagagcctgttttagtgctctcttttagtgactatggtgtctcctacaacctgcaagatcgctcttacagtcatttaggttgtctattaaattgtctactaatttatctgtaagacacatttggttacataacagcttttcgttagtattgattaaatgacaaataaaattttggttagtaaatgcatatagaaataatagtaccgttactaaacgacttaatacggcttcttgatttcctacaaccattgtagacaaagttaggtcactaattggttcattacaatttgctccaagagtgtttgctccgggactttcaaagccaggatcacaatagttacagttactcattctcttcctctccatgtacaaagattttatataataataatatgagtaatcttgtcgttttgttactttataaataaaagtattattatttaataaatacataataataatttgaacaatatattttatcagaagtatagattataactgctagatatgttagatcgaaaggagaatttatgcttaaattattatttgcgaacgctgcaatgcttatatcttttttatatttagggagccacatactaaatgatgaatttataaaatcaaattctaaagtaaaattcaaattatgctttggcatgctatctggtttatctggatgtgtacttatattttatggaattaatttgactcacaatacaataatagattttagaattattcctgttataatcacttcaatttatggaggatttatatcaacttttataagtgtatttataataatactatttagacttactttctttggaataaattattcttctttaattacttctggaaatttatttatattactaataatttttactattatatcaagatataagataaacttttcaaagaaatattttttgatgactatagttaacataatatcaacaataatttggatttcattagttttaaaagatatgaatcttatactccctgctctaggaaactttgttatttctataataatggtttctactgtagtttattatgagttaaactacatctctaaaactaataaaatgtataaaaaactcaaattcgactcgagaaaagattttcttacagggcttaataatgtaagagcatttaatggactattagataaaacaattagaaacaccttacaaaagaaagaaaacttatcaattctcatgatagatattgatttttttaaacatattaatgatacctatggacaccattctggagatttagtattaaaacaacttagcaaacttttaattgattcttgtagaactttcgatattatctcaagaaatggtggtgaagaattcactgcagttttactagattgcaattacaaacatgcagttgatattgcagaaaagataagaaaaaatgtagaatgcaatacttttaaacttgacaataatgccacagcaaaaataacagtttccattggaattagttcttatcctgatataacaaaaaatataaatactctcttaagcaaagctgataatgcattatatttagcaaagcgcacaggaagaaataaagtatgctaaaatgaaactgagattcaggtatagattaaattcacctgatctcagttttatttaagtaataaatctgccgttagatttaaaagcattatctatattctaagtattttaaaagcaatatttgatttatcagaaaaaattgtgtagttgaataaagttttgttttattttctcctactgaaattggatgtgtatagaattgaaggctaatatcgctgatagaagctaattcattatttccaacctgagtaatagaaataattttcacatctttttcctttaacttttgcgcaaactcattcataaataaattgtttccggataaagataataagaaaaaaatatcttttgaagataaagcatctaaaataatgttagtttcttcccttccctctatgacatagattagcttattgccaaaaatcatactacgctttaaatcttttgctgcatttttttgtactgctccagatccataaacataaattttatctgccttctcaactaattcaaatacatcgtagaaatctctttctttcataatttccatggtcttctcaatatctttatatgttttttcaatttctttattatcgaatgaatttcgctgcttgtcttcccattttaaatgaattttcatttcactatatccttgtaatcctaatttatgtgtaaaacgtaaaatagttgtatgagaaacattacatttagaagctaattcttgtattgacatggtttggcactcttttttatggtgtaaaatatacttccatatatacaaatcactttcatttaatttttcataattttcatcaatcaacgtttccaatttcatgcttttcttccttcttatttttttgtgttttatattccatatatttcaaaaataatatttcaattaaaataaagtatgatgttaaagattcaaaatctatgtcattatagatacttggtataagagctgtagatgtatatagattataatcacttaatttagctaaagaattatcttttaactttgttattgatataataggaatatttttaattttcaaatttttagcaaaatccataataaattgattctcacctgatactgaaataattacgaaaacatcttcatccgtagccaaatctactatagcatttgcttcagtataaccgcttaagtcataaaatatttttccagcagttaaaaaagtacgcttaaattctttctttatcgacgactgtaccataccaattccatatacgtagagagttctggatttatcaatcaattcaaaaatatctgtgcaatccttttcctttatattttttattacctcattatatgcatcgcaaacagcctctacattattaacattctcttttgacttttcattgtcaagctttaaataaacctttaattccccatacccctttagagataatttttgtgaaaatctaagaatagtcgttctagaaacattacatttatgtgctaattgatctatagcaagagtttcacactcttttcggtgcttagaaatataattccaaatatataaatcattctcatttaagtgcttatggtatttgtttatcagttcatccagtttcatgatattccccgccactattttctactttgtttcatgtttctttaaattctactctataatttatcttttgtctattattgtaaatacctaatgaattaattctcaaatttagttggaataaaaactaaaggttaatctatcttttcttaaaaaaagagaaacaagtcctcatgaactcatttctcttctttgcatattataaataaggttttataagctattgttttttattgatatctttaatatgttttaattattttaattctggccaataacctttgttagcctcaattaaatcatctaatattaattttgcaactcttgcacttggtactgtctttgaaagagtaagtgattgccataatttttgatagcttccttctatccatgcttctactgctaatttttctacacttacttgctgttccattaatcccttttggaactgaggaatacttccttgacatattctttcataaccattacttccaacgatacatggtatttcaaccattgctatcctatcgaagttttctacggcaccttcatttggaactataagtaagaatctttcccttgtattttcagctattgcacatgctaaatctacaatatatgttgcatgggcatccacttcaaaacctccgtctttgcttgtaccactttcaataatttttttacatgtcccaaatacatgtttttctcttccatccattacttcatttgcacgagtatattctgtattcgaagtttcaaccacataatctgggaataaataatattttaaatatgtgtttggaattgttgttggatccactgcaaatatatctcttgccttttgaaaagtgtgtacccagctttcatctacatgttgatttgtatctgataatgcatctgcaaatccatttgctgccatatgttctttaatttgcggcattaagtcatttccatctttatcataaatctttgaccaccatccaaaatgatttaatccataataagatacttgcatttcttttcttgatttaaggccacacatacttgccattttttcttctaaatcaattggcatatcgcaaatatttaatatttttgagtttggtcttaatcttcttgttgcttctgccactatagctgctggatttgaataatttaacatccatgcatttggtgaatacttttccatataatctagtatttcgataactcctccaatagaacgcattccatatgcaatccctcctggtccacaagtttcttgtcctaccactccatattttagtggaatcttctcatctttctcacgcattgcatattttccaacacggatatgagctaatacgaaatctatatcactaaatgctgtttctggatcagttgtatatgcaaattcaatttctggagcatgttcttttaagtgaatttcacatgcctttgctacaatttcttgtctacttgcatcattgtcataaaatttaatagatctaattggaaatctgtccatgtgttctaacagcataagtacaattcctggtgtaaacgtacttcctccacctgctactgtaattgaatacttcttctttgccatttttcttcctccaaaacctgcttattttttgcttttttctcttttctgagtacataatacacctgagaaaggcgccttacaatatagatgaagcctttagggaaataagcatttcaagtgtatttcttaacattttctgtgacttttcacaggaaatttctgttataaaattatatatatttttttaactagttgaaatttaaaattagattttacataactctaaatccttcaatgatatatgatttataaaataaaaagccgacctctgctacgcagaaatcagcttttaatttatttaaaaatattgtttgttacatgttaattctaaaattagcagataagcaaatgcatactaatctatcactataattccacctgaaatagtactaaaagactttattccgtttagttttaagacattctttaaccaagaattatatgcttttaatgtttaatcaataaaaataaaagtgaaattatataccatatatttttaagcttaacttctccaactctctttacagtaacgcttcaaagtcttctcttactcgcgcaactttcaatccaacaataacttgataggattttccatttacagaacaaccatgagctccaatagatttaaaataaggatcatccttgcaaagagctggatcatttacatttactcttaaacgagttgcacaatttgtaacatcaacaatgttatctcttcctcctaatccaactaagatattttctgcaaatactgccttactactatcttttgaatcactttgtttctctctatactctgcttttgaatgaaattttatatcttcttcttcatcttccctaccaggagttttaaagttaaatttcaaaattaaggtcctaaatactatgaaccaaattcctgtaaaacaaagtcctatagcaaactgaagtaaatattggacccaatgatttcccattagaggaatccaatttaaagaagccatttcaatagctccaccagagaatattcctacaatccccacaagatacatagttgttgaaattgttgctgcaagtagtgcatgtactacaaatagcactggtgaaataaataaaaatgtaaattcaattggttctgttacaccacacaaaattgcagttaatgtaataggtattagtaacgccaataccttttttctcttttcaggttttgctgttgcataaaatgctaatgcaatacctggacatccaaaaattttagagtatcctgtagctgtaaatcctgcttctggtaataacgatttcaaagaggctttggaagctgctatttctggtaactttgttgcccagtaagaataaagacctcctggtactacaacattatcataataaaacggagaatacagtatatgatgtaatccaaatggaattaaagcacgttctaagaaaatgaacacccatacacctaatgcccctgcaccttttacaaaaccttgaaaactatgcattccaagttgaattttaggccatataaatgctgcaagaactgctactggaatcataacaaagaatccaatcataaatacaaatgtagatccgctaaacgttcccaaccattctggtaattcagtatcaaaaaaacggttatgtaaataaattacaagtcctgaaatgagtaatgcaccaatcattcccatgtccaatgtcttaatattggctatcatggtaagaccgctagttcctcctacttgagcagagaaatcaactccaaaaaattcgccccactgtgaaatgatagtacttagaaaataatgaaatgtcaaatataatacgaatgcctccatgcaacatcttgcattttgcttttttgccattccgattggaagccctactacaaataataatggtaattgattaaatacagtccagccaccctgtaaaactacattccagcatttaaaccacaaattgcttggatctgctaatcctcccataattgtctgtgtagtaaataatgttcctataccaattataatacctgcaaatgaaaaaagtagaacaggtgtaaacatcgctccaccgaacttttgaattttctgcatcattttttcttcatcctttctctgttttctacaatttcatgttaacattatcatttttcattatcaatattctgtagtactttaggaattaaactaatctttatgaaacttttcactttttacgtgaattttcacactattatgtaatactattgcttttaaataaaatataagtaaaattaacctatattatacttagtacaccttagttgaatcttgtgattttattttacgcattctacttaagaatacacatatcaataagaaagttgactagtataattcattgtaattatgttaacgttatataattataatacatgaaagagaggtgaatgactttttgaagattatcgtttagaaatattttctccttatatatcctaataaagtagaatatatctaaaaatatctttaatatagtcatatatttatgtttaatttttttaagaaacaattaactataattgctcctatttcaggaagaactatagatctaagcgaagttcctgatccagtatttgcagacaaaatggcaggtgatggaatcgcaattaactccactggtgatatagttgttgcaccttgtgatggtactatatcattaataatggatagtggacacgcttttgcaataacaactagcaatggaattgaattattagttcatgtaggcttagaaactgtttcattaaacggtgaaggatttgaaatcttaaaatctgttaatactaaagtaactgctggtacacctattttaaaaatagatagaaaacttatagaatccaaaggattatcactgataactccagttataatagtaaatcatgacaaattaaaatcattaagtcccattattggcaaacaagtttctggtggcaaagatgttgtattaaaatgtagcttataacttccaagttatgtgttaacttaccgaaagtaaagatgcccctttgctttattgtataaaataattaagttatttctttgtgatataataattcagcaaaacataaatatcacataaagaatgacaattcaccattattatctaataaatacaataaattttttaaaaatttctatagataaacaattaattagacttctaattagaatgtgtttccatactagaaattacatgcatttcgtgaaacaatcattgaatctgaactgtgagagttcctaatacaaggttatgcgtttttttgcttgtcctaattttatgttagaattatgcaaaaattggcacaaccttgcacatgaaaccttttattaaaaatttcataaccctatggaacaaaagtttattcaatttcgtttaactatcccataagtattatctatggtttgaatacctctattaactaatttagtattttaatatatctaatccttctgcatcatatatatctacttcttttattgatcttaatatttctttcttcgcaagatcaacatacccatgtttataatataattttccaagataaagtaatgcatatttagtgtttactaaattcagcaaattaactgatactgttaattcatcaaatttattatttataagcaatatttctataacttctaaaattatattcatatattctttatcattttcatcctctgacaacatacttgttgatttttgggttactaattttattaactcagaatatactcctaaatactttttatcataattagataaattctttgcgttaaaactatttactataaataatgcatcctcatatctatttagtaatacgaaacttaaaactttatacatagacaaaattacataatttgagctttttttatcattataatttatactagtacattctttaaaatctccagttcttataagacatcttgattttaacatgattgtattttcagtaacatttactgattcttcatattcttttatatattctaatgctatgttgtaatatccaatatgataaaataaatcagcaatagttccataatgaacctttttgtcttctggaaaaaactcttccattattcttttcatctcttccagtgatacattttgtgcttttaatacatctgctatatcatataaaggctcaatataatcaggttttgatttcaacgcatcaacataataattataagcagtataataatccttatatttcatataagccttccccaactcataataagctctataactccatgttccaaatataaatttaaattcagaaggcggttcaccaagttcaatacattttttcaatgcctttatttgaagagtaggtctatcgatctctttccaaacaatcgattcataaaaataataatctgtacatttgggataatttgaattgcctatacttataaattttaaagcttcatcatatttttttaatattaaattagagacaattattcgtaatatcaataaggaaccaaaacctatattgggagtaaaattttcataggctttatagtagcattccaacgctttattcgtatcatcttctgccccatattcatttcctaaattaaaataagcaaatttattattaggatcttttttaatttgctcattcaaaataggtatatttctatttcttttatctttagaaatgattcttttatcaaggtatccataatgatatatttttacatcattgcaaacagcattataatctccatctaccctaattaattgattatgaacttccccttcataatgaataccacgataatttttaaataaccgtggatttaaatttacagcaatattaccattttctatcacacttccatagtaacttaatgtttcaaaatgataaattgctttttcatctaattccatatctagtaatactttaaaggcttctcttccctctaaactcaactcatcatctgcatctaatatgaatatccaatcctttgtggcatattttaaagattcatttctagcttcactaaaattattattccatttaaagtaataaatcttcgcaccataattttgggcaatttctactgttttatctgtagaacctgtatcaactactattatttcatcaacaatatctttaatacttttgagacatttaggtaaatattcttcttcatcttttacaatcatacacaaacttacttgattcttcatgcaatcctcctatcttatggaatatattcttaattccatagatatttttagtatcttatagcaattcaatattatctttgttttgaacatttttagttgcatttcttgtatcaaatatgaatatagaattttcttgaataaaactatagttatattttttatgggcagtagttataataactaaatctgcattccttaatacttcctgtgtcaattttattccataatgctcttcgcctttatacatataagatgatatatatggatcataaaattttacttccgaaccttgtttttgaaaattttctattatcttaagcgctggactttctctataatcgcctatatcacttttataggcgattcctaatatcaagatatttgccttatttaaagctttattaaatttattcaatatagtagcagacctttgcactatatattgaggcataaaattattgatttctcctgaggtttctataagtcttgtgtgataatcgtattctcgagctttccatgttaaataatatgggtccaatggtatacagtgcccgccaagcccgggacctggataaaatgcttgaaacccataaggcttagtttttgctgcttctataacctcccaaatatttatattcatcttattacatataactgccatttcattaattaatccaatatttatatttctataagtattttcaagaattttttccatttcagctactcttggcgtagatacttcaaaaatttcgctatttaaaacttttctatataattctgctgctatttccgtgctatctcttcctactcctccgactacctttgctgtattagcagtattatatattgaatttcccgggtccaccctttcaggtgaaaacgctaagtaaaaatctttttcacactttaaaccagacattttctctaatgtaggtaatactaattcttcagtagttcctgggtaggttgtactttctagaattacgagcatcccttcatgcaagtactttccaactgattctgtagattctttaacatagcttatgtcaggttgttgatatttatctaatggagtaggaacacaaattaatattacatctgtgtctttcaaaaacttaatttcattactcgcttttaatcttctatttttaattgcaaactttaattcttcagtcataacatcgctaatataattttcaccattattaatcatattaactttcttttcttgaatatcaaatcccaatactttatatccactttttgcaaattcaaccgctaaaggcagacctacatatcccaacccaacaatacctatagttgctgttttattattaatcttataaatcaagttatccttatctaacattaaattctcccctggttagtcaatttttttcagttaaggcaaatgcatctattatttatttgaatgtgcctaagttcaataatataatatgtttttccccttaattagttctttaattttgcagtatatttaaaaaataagaatgggataacatataccaaagaaaagtatatgttatcccattcttattttttattattatttaactgttattatatagtttagttagatttccaacatccataatattactatctagatttttgactactactacatcatttatcttgcacgttaactctataactacacataaagcataaatatacaattcatcttatactcttaataaatttaataaatttgctatgttctattgcaaaatttcctgaaacagcgcttccatctgctatattggtagtaacaacagctcctattttaatactcacattattacctacaataagtccatttgatatagttacacttacaccaatccaacaatcatttccaatgattgaacttccaccaattaatgcattagctgcgattaagcatcttttaccaatctttgctccatgtcctacatgtactaaattatcaatttttgtttcttctccaattacagtattatcccatggaaacattgctttatcaatacaggtattgtattgcacctcaacattcctacctatttctacaccgccacaatgctcaataaaaaaaattcttccttctttattaaactgaaatccttcacctccgagtataactccagatctaatcactgaattatccaatattttaacattctctctaataataacattttcctctatagttacatcattgccaataattacattttttctgcttatacctttcctatcacgtattatacaattatctcctataatagtttcaaactcttctttattatataagttaatatctctgcataaacaattatggattaagtaaaaacttaaacgtggattctctgataaacaaatcccatatttattaggaagtattttagctattttagcatcacatattatacaagttacagattctgataatgtgtgtatatatttttcatcattaataaatgttaaaatcctacttctcgtcttagagtttgaataatcaagattatcaaattctccatcattataaatactaatattctctatcttattaactaattcagataatttcatttttcaccttcctcctacttataaaaattcttgacacaatttatttctaatatgttttttactatttttatacatgatttctccaactttaagtccagcgcaatgtaaatcaattattggtttaggtcctaaatatgctaatgttttgcccattctataatttccaactttataatctggataaaaatttatacagttttcttttaaatcgtcaatatccactatcccagaatactgtatcactgttataaaacttgacaatgatttcaatttctttgatgttatatctgaattattcatgcctataaaacatttttctgaagtataatctgctacaattaaagcatctgtatttattaataaatcatggttttcttctaataaattttttatcacaactacatctgatgacaattttgataatgtggtgtatataatctgtccaaaattatcattacttacaattacaatcttacttttataaatctctatgcccacatcaaataacatcttcactgcaagtggaccactaaatttgaatgtatctaatcctggataattttcatttgttcccattacattaatagctttttgtttgcaatactctatatctatatcctcatttcttaattcccatgtttcacacatatatggaatcactgcattttctttcatcatatctattgtttctttatcaataggtcttacaaaacctaaattagttactatatcagcttgattaatattcctcttatcaaatactatctctattttatctacaacatcacaaagttcagcaaatagcattgttttctttttcacctcatccttagatgcatactttgagtctttagttattgcatacacttttttagccccagccattgctgctattataggcgtatatataaactccccacatgcagcctcagtaaaaactataagtccacttaaatccaatttagtaaattttatcgctttgcatattagattaatacttctctttggatttatcattccattttctttgaaatacattattatattattattcatttaatattttctccaattctgatacaatataaattatctctttcgacaaaatattgttatgcaaaggtaatgctattccatgcttatgagcatatacagaattgtaaaattgacaattttcatacccatatttctctttatagtaaggctcttcatgtacagcataagcaccaaaattagtttctattcctttatcttttaactctataattaatttatctctatcaattcttttatctaaaagtatatgatatgtctgccaaacatgtttttcataacttttttcttctggtaatgttataaacttcacatttttaagcaaattattatacttatttgctaattcaattcttctctcatttattaattctaattttttcatttgtactgttccaatagctccttggatatttgtcattctataatttaaacctgcctctacaaagcttattttcccgtttttatagttcagtccatgatttctgagtattctaatgttttctgctaatttagaattatttgtaactacgattccaccttcacccgttgttatagcttttcttggatgaagactaaaacaaccaatatctccaatcgttccgacctttttccctttatattccgctccaagtgcacacgcagcatcttctatgatttttaaattgtattttttagctatggtcactattttatccatatctgctgactgtccaaattcatgaacaggtattattgcttttgctttatcagtaattgcattctctattttatctgtatctatacatagactatctagtttaatatctacaaacttagttatagcacctacaatttctactacattagctgttgctggaaaagtaaaatcaggtactataacttcatcatctgcctttattccaatagcaagcaaagctaaatgcaatgcagcagttccactgctaacagcaaaacaatatttagcatttaaatattcttttaattgattttcaaattcttctactttatctccttgcaccaaatattttgaatcaaaaactttttttatttcatccaattcttcctgccctatatctggagaagcgagtttaatcatttagaacacctctataccacttaattgttctttctaacccctcatctaaatcatatttaggtacaaatttcaaaatctctttagctttttctatgcttggacttctaagttctatatccacataattctttggtacataaacaatttcagatttagactttgctattctctttattaattttgcaagcatagctatagtaatagttcctcttggatttccaatattaaatgcttgtcctattgctttctcattatctaagcataacattactcctgttataaaatcgtcaatatagcaccaagatcgtatttgatttccttcgccatgaatttgtatctgttcatttttgatggctcttacaacaaattgatgaatcgcgccctcaccaacctgaccatctccatatatattaaaaggccttattgttacgattggaagtccatactccttataaaaactataagctaaatgttctcctgcaagttttgagactgagtaagtccatcttgcttcccctacaggagctaaatttgttgtatgagcttcatcaactttatatgcataagatccaaatatctccgaagttgaaaaatctataaatatttctattttttgattttttaatgcttcaagaatattataagttccaatcatattgaccttcatagtactcactggattttttataacagtatctattcctgcgattgcagctaaatggattactatgttaggtttaaattcatctatgacatgctttaaaaaattaaaatttaaaatatctcctttaactaattttatattatctttatttaataattttgtatttttaatcgagtttctctttaaattatcatatattaataattcattattactgctaagcttttcgcacaactttgtgcctataaagcctgcaccacctgttagaaatatttttttactttttatcatttattatttctcccattattatttgctatattatccatatatttttcaaactcttttacaaaatactcaaatttcaaattattactttctatttttctattcattttcacagtatttctaaagctgttatcttgaattaattttttagaataacttaataatttatcaaaatcacctgttttagggaaaatagtttttgcattattatataaatatgctggagccatataactagcatttattacatcaaatgcttcattattttcttctttataaaaagtaataataggcaattctgcataataagcttcttctaaagagtatcctccaccaggatatgaattcaaataaaaatcgcaactttttaaatatgatgatgcttctaaattaaatcctgcaaaaatcacattgcattcctgaattaatttatttggaacatattgctcaaactcgctatagttgcctccaaatacaacaagacatatgtcatctatttcattaataagcttaattacaaaattccaaaattcattgtttttgtactttatagaccttccaattgaaattactacttttttcttcttatcaatattaaataaagttcttatatccagatttttatccactaactcagtatttattggtgagattaattcaaatatattttcacagcaattatcttttttaatatacgtgtaacaaaaatctaatttcttatcaaaataatcttccggctgttgaaattgaatttttccaataatttcacaagccttttttaataatgggtataacaatattcctatcggtgcaaaatataaactttgatatactacataatcaaaattttcttcacttatataggtgtagaattctttaattttatcctcaatacaattgctaattggtacaaataaatttacatttaacttattaaaatattctatactttctttactattattaaattcattcttgtttaaaagactcaatactgaatatctatctttagcattctcagaactttctaaataatttataaagaattgtgttacactctgatgtatatccaaaccatttaatataaataaaatctttctcttattttcttttaaactcatttttttattattaaaataagtcaaataattctcatctaaaattctttccccgattttatccatttcctcgtatacattttgttgcatatatttaaatcttgaataactagtaaatctcctatacatatttccataataataattgaatttgaatgttaattcatatttacttcttataaaccactcacttaaatatttcatatagctttcttcatcattgatgcttaataaataatcaaataatgcttctgtattagtcatgtcatctgaatttaccataaattttgttttcattaaatcaacttggtcactacttttccttaaatgatctggatttatataattcaaattttctttagatcctttttcggacgaactaatcaatagatctttaatttttattaattgatcatttaatgaatatctttctttaataaatgccctatatacttttgaagtataatttttatcagaaatcatttcgacagcttcagttatcgtattccatacatattgagatggatatattactctagcccctacaaaattatgtattattggttttattcctttgcacatggcctgcattacgcttatattttgtgattcaagaacacttgtacataaaatacaatttttatcttcaagccatttatctaaatcattctgccaaccttcatatataacattattctctaatcctaattctctaaccatttgattatagtaaagtacatctctattatcttgaaaaactcctgcaatatataatttatatctgttatcctcatcataaatagccttaaatgtatgcaataaaagcataggacctttcttataattaatatatcctacataagctatattaaatccattttctcgctctttatatgtccattttttttcatctattccatttgggataacactaattattttttcatctatgttaaaattttgaacaatgaaatcttttatatgtgctcctactactattagcttgtctatactgttccaagtcacattattaatataatctgtaaaggcttcataactatgaagcctacatataactttcttttctctagctaactctaatttacttccatatgctattaattcatcacaccattcaaaccagcaaatatctgcccattgcataccatcttcaatttgcttatattctgttactataattttttttatctcatattcttgtgacagaccctcaataatatcgcctaaaaaactatctaatcctagccttacaaaaaacgccaatttcatcttatcttttacgacacatgaaatatcttcttttaaattttcagtatcattaattaattcatcctttgattgcattacaatattaaccaagttgtctttcattaaaccactccaaaattctgattataatattctactctctgctgatttaaattatgatttattatttcttattattgactttttttgaatcttacttctaaatgagtttaatgttagcgtattcaaaaaaataatagtcaatttatctgatgaaaaatatccatgacaaactggacttgttatttatttttacgtgccttaacttaatacaaattgatcaatagaattcttttaatcataaatttaagataatttacttcccccactaaattatgtattgctgtatcacaattaaaaaacaataatataatatactataaatatacaaaaaatctaaggaatcaattaaaggagatgttatttaatggcaagttttgatacgcctcaaaacagcactattcaaacaatttatgctacaggaactatccctgcacacaatgatgcaggttttattgaaatacaagccgttgcttctcgtaatggtggtcatgaaactttttataaaacatttcaagttgctgctagcgctacaagagctactgctgaagtatgggctggggctggtaactatcagataattattactcctaaattatttggtacccaatcagttagttcgacaaccgttataaatagcttcaaacattaataagaaccataatataaatttcatggagtctaatatccgactccatgtttttaatatgcctatataatttttataaaaaatctgcttcgcaaggtgtgagtttaacatacttctaaaagtcatccacgtatttgactgtattataattttctctaaagaattaaataatcttgactgatgaacttattattttttcattgtgttaaatataacatacagtatatcttaatcttctaattatctttgaaaataattccacataaagtactcagctatttgtataaaatttgaatagtatgtttattcactcctttttatagatctcatatactatattaaagtggaacctgtttttaagtaatgtgaagtaatactataatattgcaatagtatcggagaaatggaggttaataatgaatagtattacaattccagctattaaaagcctaagcattacaaataaatattctgataaaagtctaaatgaagataaaataatagtaggcgctgatggtaactataactactacagttatttgttttgggatatctcatcaatacctactaatgctacagttcataatgcaaagcttacgcttttcaaaactgataatttttattatgatactagtaaaaaattctccataagtccactctatgaatacttcagtacttatacaacttataataattctcctaattatgatcattatactgtaataaacttttatccattgacagataatatatcagtaacaatagatattacaacaatagtttcgtcatgggtaaaaaatagtttaaaaaataagggtataatactatatggaagaaatgaagatatactcacaagcttcggatctgtaaaaagttcagacaactatcttatgccatttataatagtaaattatgatccatattcccccaataaatgtttgaaaaaggaatgtactaataaatattctaaggattgttgtaaaaaaaaatataacgatgaatacttcaaagatgattgttgtgagaaatatataaaaatatgcaaagaagaacttgaatcgattttatttaaagtttgtaaagaagcttgcggaggtaattgcaatccattcccctcaaatacctccattactagaacggtacgagtgacaggaactgtagctccaacatcagtttattatatagttgtagatttacaagtaactcgcgcttctagtggacaagtaaatcattattatgtatcagatgagtatgataattccttaaataatactcctcttcctatagataaaacgtataatattgctgtaagccctcctattcaatctggtgatgcagaagatgtgattttatatggttcctataaaggcttttagttcctagaatttatataataataatgagagcttttaaagcacataaaaaaaataatcatgacattttggacttgttattttctttaatctgcctaagctctcattatttttacatatttacttgtaatataaatctattaatagatagtttttagtcctcactttttcctacaccagataagattaatcccttattatgttctagtgcccagcttataccccagtcattttggaatataagaagatttctatccttaaaatctttaaccttcttagtatcagaagttaagtttaatgaatccatgttaacatccttattttcaatccatcttacatatctgtaatctaatctatccattttaacatcaacattatattcgctatttaatctgtattctaatacttcaaattgaagcacaccaacaactccaactattatttcttccataccaatgtgaatttccttaaatacttggatagctccttcttgggcgatttgagaaacaccttttataaattgctttctcttcatagtatctactggtcttactcttgcaaaatgttctggtgcaaaagttggaattccttcaaatttaaatttctttgatggtgcacatagtgtatctccaattgaaaatatacctggatcaaatacaccgattatatctcctgcataagcttcttcaacaatttctctatcttgagccataaattgttgtggttgagctaatttaatcttctttccaccttgcatgtggtatacatcttcacctttattaaatttacctgaacaaattctcataaatgcgattctatctctatgagccttattcatatttgcttgaattttaaatacaaaagcagagaacttatcatcaaatggatcaatagttccaccacttgaatttctagcaagtggtgatgtagtcatttctaagaaatgttccaagaatggttccacaccaaagttagttaatgctgatccaaaaaatactggtgttaattctccacgacgtacaacatctaaatctaattcatctccagcaatatctaaaagctcaatatcttccattaatttatcgtgaagagcatctcccaatatttctctaaacttaggatcatctggtgaaccttctattgcttcaacttcattttgaccgtgatttccaccattgaaagctataatcctgttattgtctctttcgtatactcctttgaattccttaccagaaccaattggccaattcattggataagttttaattccaagttcattttcaatatcgtctaataattggaatggatctttagcttctctatccatcttatttataaatgtaaagattggcatttctcttaaagaagcaacgtggaataactttcttgtttgatcttctatacccttagcagcatctacaaccataactgctgagtctgcagccataagagttctatatgtatcttctgagaaatcttggtgacctggggtatctaatatgttaatacagtgattattatagttaaattgcataactgaagaagtaactgagatacctctttgcttttcgatttccatccagtcagaaactgcatgcttagatgcctttctggctttaacagaacctgcaagtctaatagctcctccatataataaaaacttttctgtaagtgtagttttacctgcatcagggtgagatataattgcaaaggttcttcttttctctatttcttttatataatcagccaacgctaaatcctcctaaatttataatcaattaattcataaaatttctacggaaattattaaaagtactttatctacatcggacaagtcctcctaaattttatatatcattatttttaagtgacaaaccccatatggttttatttaaaatttataacttcatttatatgtacttatacgacttcattattaactaaattattatatcatatgaaatatattatgtacactttatgcagtatatttacttgagcctgtcctttattaatgccagataaactaatctgttaaataagattaattataaaaacaaaaagtaaatagtaacaaaaatttaattatttgtttagattaaatttatattttcataacatttttgtcacttttttactatataatgatttaatggaacataaactaaatcatattatattagtttctgttagtttcaaaacttttagatgaaattataagttttgttaacaaattttatttttatattaaatttttaattattagggaggaaaaattatgtttaaaagagcaaacaaaattacatctttattagtagcagcagcttcagttatgtctttagtacctgcgtatgctgcagatgtaaaaaaaattgattcagatgatggtactgtatacaatgcagtagcttacaaagatggtaaattctttgttgatggagaaattaacgatgacgaagaagcctactatgtatctgatggaaaatttaacaaactagaagatattgattcaggagatgacgctgatctattcggagaaaaatatcttgatataaatgatggtgattacactgttgatttagataaaggtagtataactgatgatgatactaagggcgatactgctgatgacgcttcagcagatctaagaaagaaaattaaagatgacactgatgacagatatgatgaagattttgctgataatataatagatgaaaataaagatgatactgaagatttaactaaattaaatataattccaggtgctaaatataaaactccatggtattatacacaatataaagcagcagataaagctgtgaatgataatgttaatggactaaaggaaataactgatcaaaataaacgagttttcaatgtttatactgacacaaaaggtggctacattgatgctgactataacttaggaaaagttaaggttacaaccactgctgatggtgcatcaactaaaacagaaacaatagaaaatactaatgataaatacgatgctgctggtaaggatgatgcactaactgcaagtgtttcccaagataaaatattgacacaagatgatgattatatttatagacttgcgactataaaagtaaatgtaactactgatgctggtgctaaagttagaataagtgaaataaatggtgttgaacttaacccaaaaaacgcaaatgacaaaccacaaatatttaaagttgaaaatgatggaggaactgtatcattcaaggctattcaaaagatatccaaagctcaagactccgatgatgttgatggagctaaatatgcaaaaactgtaactacttatgcactttctgatgaagatggtaaaaacctagatgctaaagacttattcctaaatactgatggcactatcaatgaagatactaaatttactgtagctaacggaaaacttatagcctacaatacagaaatgaatgagtataaaaaagttgttgtcagagcatattcattaaaaacaaaaggtggatactactacgccgacgaagaagatgaaagtaaagaagattgtgaagtaagttctcaagatgataagacatcagctgttcaaacagacgttgatggaaacctatggagattagatggtggatatatctataaatttgataatacagatgattgggacaaagtttacaaagtcgatggatcttttgatgagctttcagtctatgataaagacaatatagctgcttggagtgaagatgatgatgtttattcattaataggaggaaaatcttctgatgataataacactaatcctccaactacaactgcaggatgggtacaagctgctgatggaacttggacttataataaagaagatggaactaaggctactggctggttaaacttaaatggagtttggtattatttaaacactgatggtgttatggctactggttggttaaacttaaatggagtttggtattacttaaatccatcaggagctatggctactagctggttaaacttaaatggaacttggtactatttaaattcatcaggagctatggctactggttggttaaatgataatggaacttggtattatttaaattcatcaggggctatgttatataacacaactgttgatggttatgtattaggctctaatggagcttggattagatagttttaatctaattattcctttataaaaggacaaggttttctatactgtcgtttatatacatccttatctaaacgatggtatagcttaccttgttattttttatgctataaacaataacatttctatatctaaattgatccctaactgcatatatttcatacttctctaatttttctattcctatataacactattttcaccttaaattctttattgatctcagaacttcataacctattctatatttctaattaattatcatttataaactcacactagattttatatacagatatcacgtcaagccaaagtaaaagttacctaataatacttaaaggaatgtatattatattaaaatacgaatcatcattacccttaattttcttataattttgatatttttccaaaaagagtaccaaaattttcacatatattttgtataatatagcgaaaaagttaaatatcacttttaatttcgaaaaaataaaaaaatatttaaataaaatattatataaaatggaggataaattatgctaaaaagattaactaatgcaacatcactactagtagctgcagctgctattatttcaatagtgcctgctcatgcggctgattataaaaaaatcgactcacaagaaggtactatatacagcgcaacagcatacaaagatggtaaattttatattgatggagaaattaataacaaggatgaagctgcttactacttagcaaacggtaaatacaataatctatcagatattgatagtggatcctcttctgaaatctacggttctaaatatgtgaacgtagaaaatggtgattatttcattaatttagataacggttctgtaactgatgaatctataaaagaaaatgcagaagatgatgctgcttcagctctaagaaagaatcttaaaaaagacaatgatggaagattcgacaaaactgaagctgaaacaattcaaaaattaacgaatgtagagcttccagggaataaattttcagatccatggtataaatttgaatattcaaaagacaattcaacaaatggagcaattactaaattaaatgtatatactgatgctcaaggaaactacattgatgctgattataatttaggatcactaaaagtaactacagttgcatcttcatctacatcaaaaacaataattgtagctaacacagacgatacttatgatgctgatagcactaattctattacaggaaaagataaaatatcagcaagcattgatacttctactggaaaaataattggacaagatagtagctatatttatagaacagcgaaggttactgtaagtgccgctaatggagctaaaataactaaaattaatggaatggatgtcactgttgatagcggacatacatttactgtaaacaatagcacattgggttctggcactagtacagtaagtttcaatgtaattcaaaaaatatcaaaatcgcaagcttcaggtaacatagatggagctaagtacgctaaatcagtaacaacttatgttatttctgataaggacggaaaaaatgagtctttttcctatgataagtatactgttgccaacggtaagttagttggttacacagctaatagttcaaatttaaaagttagaacggcaacattaacgtcaaaaaatggatattattatgttgatttagctgacgaatcaagtgaagatgttaaagtaaatggttctaaaagtgctgttgatacagatgtaagcggaaatctttggagattagacgccggatatatctataagtgggataataatgaagactggacgaaagtatataaggtcgatggttcttttgatcaaatttcagtttacgatgataataatatcgtaacttggaataaaaataatgaagtttattcggtaataggtggaaaggagacaattccaacaaccccagctgaaccaacaactcctgtagtaaataaaggatgggttaaaactgatgcaggctggactttctacaacactaatggaaatcaattaaaaggacaatgggttaatgattccggaacttggtactatattaaagcagatggcatcatggctactggctggatcaaggatggatcaacttggtatttcttaactggctcaggtgccatgaaaactggctggttgaatgataatggaacttggtattacttacaatcatcaggtgctatgaagactggttggttaaatgataatggaacttggtactatctaagcgcatcaggttcaatgttgtctaacacaattgttgatggatataaattaaatgcttcaggtgcttggattagatagaggatatattaataattgggctatatcaaaatctatttggtatagctcttctttcattcgatattcagatcttatttataaaatcaacctccttaagattttcttaagacacgttaagaaaatcttaagaaaatttaccacttaaaaaagtaccaagtactgtttaaagagttgtatattatagtgaatgacaaaatcttacctgtatattaataatattacatttaattgattattcattcataactattagctaaatattttaattagcttaaatactattaaattttattttcataagaggaggacaatattatgataagaggcatgggaaaggtaacatcactattagtagcagcagcaacagttgcttcattagtaccttttagtggcgctaatgctgctgaggtgaaaagaattagttctgatgatggaactatctataatgcaatagcatataaagacggtaaagcttatatcgatggagaaattaatgatgacgaagaagcttactatttatccaacggaaaattcaataaattagacgatgttgattcaggagatagcgcagctctatttggagaaaaatatttagatatatcagatggagactatactgttgacttagataaaggtagcgtaactgatgatgatattaaaggtgatactgaagatgatgccgctgctgctttaagaaaaaaaatcaaagatgatacagatgataggtataatgaaactgaagcaaatactattaaagattcaaatcatggtgacctattcgatttaattccaggagcaaagtataataaggtttggtattatacacaatataaagccgctcaaaaatctatagataaaaatgtcaatggattaaatggattggattcagcccatcaaatatttaatgtatttactgatgataaaggcaattatattgatgcggactataacttaggtaaagttaaggttacaacaacagcttcaagtgcttctggtactacattaacaaagacagatacaatagagaacacaaacgacgcttacgatgcagctgatggaattatcaatggaactagcgttagcggctctgataaattaagtgcaagtgttgttcaagatagagtattaacccaagataaagattatatatatagacttgcaactgtaaaaataactattaccactggtgcagctgctacaattagtgaaataaatggtgttaaagttgatccaaataatagcaacgatatcttcaaagttgaaaataacggacaagttgtatctttcaaagctattcaaaaaatatcaaaaactcaagcttctggtgatattgatgacgctaaatatgctaaaactgtaactacttatgcactttctgataaagatggtaaaaagttagatgctgaagatttatttataaatacttcaggcaacgtagtcactacaactaactatactgtaggttctggaaagcttatagcttacaattctgaaattaacaataacgacaaagttactgttagagcttatacattaaaatcaagtagtggattctattatgctgatgaggaagatcaaagcaaagaagattgtgaaaacagcaaaaaccaaggtgctgctgttcaaacagatgttgacggaaatctatggagattagatggtggatatatctacaaatttgataatactgatgactgggacaaagtatacagagtagacggatcatttgatgaattctcagtttatgataaagataatatcgttgcttggagcgaagatgatgatgtttattcattaataggtggaaaacaatctaatactgaccctgatgatactccagtagtaaaaacaggatgggtacaagcttcagatggaacttggtcttatattaaagctgacggaaataaggcgacaggttgggttcaagatggatcaacttggtactattttaaagctgatggatctatggctactggttgggttcaagatggatcaacttggtattacttccaatcatggggtggaatgcaaactggttggctaaataataacggtacttggtattacttacaatcatggggcggaatgaagactggttggctaaatgataacggcaattggtactacttacaatcatggggcggaatgcaaactggttggtttaatgataatggtacttggtactacctatactcaaatggtgttatggccgctaacacagtagttaatggatacaacttatctgcaagcggtgcttgggtataaattatcatatataaactataaaattaataatataaaatctatatattaacctaaataatatgctcttttaaacctctcctaggtttactataacaaggctgtctcaaaagaaatagatactttttgagacagccttacattttaatataacgggattcaaattctaaatctaatataatttcgtttacataaaagtaaatataatctttaaattattgatcatagttattttggaggttatcctaaattataatttcctaatattaaagacttttataataatgtatttaaaagttcaacttcattcgtaattatactatctactccaaccattatcacctttttcatatcaactaaactattaactgtatatggatttacttttattcctgcatctttaatttctttaatatattcttcgtttaatatacttgaaaaatgaggatgataacaatcaacagaaatggctttcaaatatttaggtacattaactagtatagtttctgtcagagcacctaaagtgatctttttattattctcaagttttcttacttttactaaactagtatgattaaagcttgatattataaccttatctcttaaattatattcatcaatcatagacaaaacttttttctctagacctttatattctatgacactattcttaagttccaaatttaatactttcaaatcagagtctgcaacaagctctaatagttctcgcagagttggtatttcctctccacctctgttttgaaaatattctacttcttccatagtatattttccaaccttatagctaccagcttgtttaccttcctcatagtttctttctgttgccatatttaactttaaatgtgccatttcctgcaaagaatcattctttaaaagttgaatttccggtacacttttagttctaaatatctttagttcatctagagtataatctttaacaaagccatggccatttgtagttctatctaaagtctcatcatgaagtataattggaactccatccttagaaagctgaacatctgcctctattccatcagcattatactcaatcgcttttttaaatgccaacattgtattctcatcaaactttccactataacctctatgcgcaatatttaaaatcttcaagttattccccccttgttaaaatataatttatcttacacaattcccctaatatacatatcttacactaaacataactatattaccataatgaatattagtttcatgattcttaattaaaaataatttataataacacactctatatttattatattttaaatatatttatagtttaatttctgcattttattctgattaaatacttagataagtagaattttaaatgtaaaaaatacctgccaagaataagtttgttccaagcatattcttgtgcaggtttatacatactttttattgaccacttatttttatttctttagttcctataactcctgaaccatcagttgcaattgcttttacaataacttttccatttgatatcgctgttagcttaccagtatcacttattgttgctgatccatcctcgtttacaactagccactttactttttgattatccgaattagtaggatatacctttttactcatttgtaaacttccacccttagtagttattgaacttatctctgtagttccagaaataggtcctaaaactactatattttctacttttatagtagtttcaccacctgtgtcttcatttttcctccactgagcatataatgtgatatctttagttatttttattctatcatcatactcgtagcttgaaccatcaccatcactttttgtattccattcaatgaaagtatacccattcttaactggtttatacaaagtaagcattgtatcttcatcaacagtttttgtcctaagtaactcatcatcatcgtcctcagcctcaggatctttaaacttaactttatattgtttttttacttcctttgaagggtctgtaggaatatcctttgacatttttgagtcctcatcaattatttgatttggtacatatggaagtgtattatttccataataatcaaaacttttagtcggtattggataatcacttcctatacaagccccactatcatcaaggttatagatccttccatttataatagaagttcccttctgcattgcaccgttttctgaaaatatataaatctttccttctatttgaattacacctgtttgcattactccacttagatcagtataataccactctccgttgtcaagaatccatccagttctcattaatccataagaatcaaagtaataccaaattccgtttatttgcttccatcctccattagcataaccatatatatctgcataactccaactcccatcatagttttcaatccatgcagctaaagactttactggagctacagtaattaatgatgaaatagcaagacttactgcaatagatttccttaaatattcatacttcacaattaagttctcccccttatctttcctaattatttggtcaagtcataaaactacaacttgaccatttttcctttagtattttatacactctttaactatttggatttattattattgtttttgtaactgatattcctgatccatcatcaagagttgcttttatattaacgctgccttgttttaaagctgttaaatctgctgttaaatctccagttgaattaatagtcgcaagatccgtatttgttccgtctatattacttatagaccatatcacttttttacctgttacactagttgggcttataactgaagtcaatttcactgtgtttccaacagctactgtattacttgattgatttattgtgattccagatgctgaatttattgttacaactgactgtccgacaattccagacccgtctgtcgcagctgcgtttacagtaaccgttccatttgatactgcagttaaaattccattactatcaattgttgcttttcctgttacaggcgttactgaccaagttattgctttattaactgcatctgttggccccaccgttgctagcatttgtaatgtaccatttggaataactattgtagaaatatttcctgttcctgtcacagttattgtccctactttaccacttatagttataggcagacttcccacaacttttgatccatctgttgcagttgcatttacagtaaccgttccatttgatactgcgcttaatagcccattgctatcaactgttgcttttcctgttccaggagttaccgaccaagtcacacttttactagtcgcccctgttggttcaaaacttgcagtcatttgtaatgctccaccatccgttatttcatttccacttccatctggtgcattaactgtaactttagtaaccttaacttgtggaattacttttactgttatatatttgctaattccctttccattatctgcagtagctatcactttaacatcaccagaggatactcctgtcaacactcctgaagatgtaattgttgctgttcctgttccattggaaacagaccagttcactattttatatgttgcattattcggatctacactagcactcatctgcaatgttccaccaaccactacttctggagcttcatcaggacttattgttatatctgttacatttgtaatttgtccagctattcttacagttgcacttccaattgcggttgtaccatctgcatttactacacttgcttttactgtaacagttccgttagtcactccttttatatttatagaacttcctactgttccaccttcaatcttagcacttccgccatcacttccactaataacttcccaatttacagcttctgatgtcgttgtagaataacttggtaataaactagctatcaatccaagtgttccatcatcttctgttattgataaagctgctccatcttttgttgctatattaatcttagttgcaggtatattattgtcgataccacttatagtgacttctttcgtatcactaatacccgttccatcagtagcagtcgcttttactgttacttttccatttgattttggagttaattcaccagtattagtatcaattgtagcacttcctgtattattctcaacagaccatactactgcaccattagttgcatcctttggtaatacagttttatccatagttacttttccagttcctgttactgaatctggtccatctatagtaattttagaaaccttaattttttgaccacttatagtaacatctttagtcgcaactactccactaccatctaatgcctcagcttgtacagttactggtgttccatttgtatttgttaccgcctttaaaagtccagttgagctattaattgtcgctttgtcttgtccagacttaattgaccattttactgatttattagttgcagtagttggggttatatttaagttcaattgtaatgttccaccatcttctgtaattgcaaaatcagttttagttgtagtaatatccatcctagttaccaatatttttgtactttgtccacttatcgttaccgtcatacttccaacaacattattacttgcagttgcttttactgtaactgtcccattagatattgcctttaaaagcccagttgaagaatcaatagatgcgcttcctgtattattttgaacttcccaagttacagcttgattagttgcatcttctggcaatatagtcgctttcatttgaagagttccattctcagctgttattgttgattctcctgattgtccgcttactgtaaccttacttactggaaccactacatctgtgtttgtaactgtaacttcttttgttccacttacatcagagccgtcctttgcagttgccttcaccataactgttccagctgatactccagtcaatactccattgctatcaatagttgcttttccagtttcatcagaaacagaccatgtcacatctgcattagtaacattacttggtgatacttctgctgtcattgtaacggatttatttacagtaacatttgagtttccttttatattaatatcttctacataaaccgatgtatcttctttccattgtgcatatagtattatatcttcttctacttttatactatcatccgcatcgtagctctttccagatccattgcttttagcattccatcctgcaaaaacacgtccatccttagttggcttatataagtcaaatgacttaccatatttaacagttttagttttaagctctgatccatctgaatctttaagtaaaactttaaaggtccttccttcatttggattgtcatctgatccagttttatcctcaataacttcattaaatttcgagtcagttggagaggtaattaccttattgtcagtattcttcaatacctgaatgcaatttcctgaatcatcatactctttttctggagttggcattttagttccaacgacttctccatcagaaccaatagtgtaaaactctccatttataactgtattatttgtctttatcgctccgttatcgtcaaaaatataaacttttcctgagatattaacaattcctgtttgaattacaccacttgaatctgcataataccatttcttattataattaatccacccagttttcagtgctccatcattttgcaagaagtaccatgaagagcctgctttgatccatcctgtttgcattttcccatttccatcaaaataatatatctgtccgtcaatcctcttccatcctgtaactttttgattatcttgcatataataaaaattcccttgataatcatttacccattcggctgaagcccttaatggaattagagtgaataatgtcatagaaacggtaattgctgaaattattttatttataaacttccatttcatcaaatctacccctatcttatatttttcatagtaccttatattaaaaagtacttttgtcttaccataattcaaacaactattataataaaatttaacagagataatatgtacttttgaacaattgaattcttatcacacaattatccaaataatattcctgaatttatcttattactctatttattatcgaagcttttttgaataactatatagatataataccattttacattaaatatcccatattgagtataatttaaaaatctaaggaggaaagttgccgtcttcccccttagatttaattcatgacttcaattaatataaggttccatctgaaccaaacatatattttgttccatctatatatcttgatcccgttaccatttctccattaatattaaaataatagtttttaccatcaataactacccattcattttttttcattacacccgtaccttcatctaaataataccaattattcttagaataaatccatcctgttttcattgagccatcatcatttgaataataccaatttccattagctctaaaccaacctgtctgcatttctcctgatgtattcttaaaatagtaccaattactacccaagttaagccaatcaccagctgcctgtccattatcttttaaataataccattttccattagaagatttccaaattgaagctgacattgatccatcattattaaaataataccagtactcatcaactttaaaccaatcctttaccatcttcccatcagcttttaagtaataatatttaccattgtaattaacccactccatctttttaacagctccatcttcaccaacataataccaatcatcatcttgtacccattgattaaacaattcatagccctttttcttatcgaagtagcacttcttaccatctacgatctgccaacctgtttccatggccccatcaattctattaaaataatatatttttccatttatcttttgtatcccttttaaactgactccgtctttatcataatagtatatatatccatcatgttttccccagcctttatcattatcatacctgtcaaacactttatcccaagcatcatcaacatcattattcttatctttaagagcatcggtaagatcatctaaggagtcatttatgtcatttatcccatcacttattccatctatagttttatcaaattcattcttacctttatctatcaagccgccaatttgagtatttatatctggaatcatattgtatgtcccactttttatcattacctttatcttatccccaacattacctagattaactccgtcaatcatattatctaataaattcttttcgtaatctccaactacaacagcatatttataacttttatttgctgtgatatctccgtttttagttaatgataagcttaaaatagagaatttagttccatctatatccaaaggaaaacttaagctgccactcaaattagtaacaccattaaaatcaataatatttaaatctctatttattttatctgattgcccctgttttgcctttaacatattataaattgggttattaattacatataccttgttgtttatggaatcaataacattgatactcataccatcaccaataactttagaaccattatctaaattaattacttttgaataagccgttgtacctactgctgggtcaaatgtcaatgacggaactatatctaggctactgtaagatgcattcctcacattagcactataagtatttatgcaatatgcgccatttcctaccacagtattaactattgatcctactaacccctttaccacaaaggcctgagctatgacatcaccagaattatttttcccagtatactgatatatagggatattctgaaatctgctcttaatagcacttggtaatgctgcttgtaagtttttctccactataggttcgattacgtttttaagcgtttcctctggtatagtacctcctgtagccgattctgccttcgatacaactgcatttgttattggatctttcaacacctcataaacttgtgctgaaatttcatcaactagcgaaccagacagattgtacgataacttgccacattcctcattatcgattgactttgcgcctttactgctaaacatcaattttactccattttctaactgagggtttatagttgtgttttcggccattcctataagagtatctccatcaggaaccattgatcctatatcaattccagaaagagctatgttattagtttggggatttaaaattatttttgaaatatcattagtctccgctttaactggagtactgaaaacactatttggtattgtagctataatacttgtcccaattaatataagtgctaatattttattaattcttcttatcatgccaatcgcctccaaaatatctatatatattatatcatttatactggtgagtttaaatattctaataatatatagttacttttaatgtgcattatattatgtaaaattcattggacaaatatctaattatataattaatgatataactatatttacgaattgagctataaatatccgcataaaaataaccatatcgtgatacaaaaattatatctttgatatggttattctaaaactctttaatcaatttattccttaaatatttattcttattattttaatttgaatttttgtactaattccgttaaatgcattgctatctgagcttgctgagttgctgcattggctacttgcgatatagctgatgaactagtttctatttctgattgtattttctcgctattaacagaagatttttgaacatctgcagctgtactttgaagtgcttcatttatctgctcaactgtagcttcaacctcttgagccattgatactagttcctctgacattgagcttacaaaatcaccatcattactatacttttctccaatcttagcataatcctgtaactgcttattaacttcactcgacataaagttaagtatatcattactgttatctgagagatttttaactgcatcctgtatcttagatattgtatcttggattgtaaaaacagtttgggaagattcctctgcaagttttctaatttcttctgcaacaaccgcaaaaccttttcctgattctcctgctctagccgcttctattgctgcatttagtgccaaaagattagtttgctccgcaatatcagctatagccccagccataactttaacttcctcaacaactcttgcatcttcaattgcctttattatatccttttctttttgttctcttatttgtgttgtatttgcaatagcaattttactatcttccttgaccttttcagctcttctctgaatcttttcagcatttgtacttccatcggctgctttatttgccaagctttccatgctggaattaacttcttcaatagaagcagcaatctcttctgccgttgcacttgtttccgtcattgtaacatttatatttttggatgaattatcaacttcatcaagcttggctgatacttcttctacattcgcagatagttcctgacttaatccactcatattacaagcttcatttaaaatagttgaaataagattttttacattctcctgagctacgtttaattctcttccagtcgccccaatttcatcatctttagttatttcaataccttctgaaaaatcatagcttgccaatttcatagcaaatttctgaagactgtttaaccttgagattatatttttatgcatgtaaaatccagcaaaaattgcagcaattatacttatgatacataccactacagttgtcgtaatatctcttgccagcgtatctccattggcaataccattttttatatcactaagctgcttaaaattcactattcctgatataaataccaaaatagacataattacatacgaaacttgaagtttaacctttaatgatacattttttttctctttattcattttgtctcctcctatatgtaccttccaatctaattgcattcacttatgaaatattttaataaatagattcatatttatagacagtgatttactatcctacccaactttataatatcattattttttcctacattcaactaatacaaacataactctacaattataacattatttggacatatatataaataatgttacatagttttaacttatcctttgtacaaaaataaaagtgatatcctatcataagatatcacttctattcttaattatgcattattcaaatttatccattgcccatcaaggaacaacattcctgtcttcataactccacctgcatcgaagtaataattctttccatttatattcttccatccagttatcattattccactatcatctaaatagtaccatgactttccattatataaccatcctgtcctcatactaccatcatcattcaagtagtacttatttctatcataggtcacccaacccttttgcattaccccatgatcatccataaggtaccatttacctttatattgtgcccaagctgtttgcatttctccaaagttattaaagtaataccattttccatcgtaagtagcccatgtattaaccctcatagctccattagcttcaaggtaataccaatatcctttgtcataaaaccaacctgtttgcataataccatctttatttaaatagtaccaattaccagaatcctgtatccatccagtttgcatatacccgtttatatctaggaaataccattgattgtcatacttaacccactgatttttaatttgcataccagctgcattatagaatgtccaatttcctccaacaagtacccactgattagttccttctatatctcccctaattacacttaacttataagtagtcgttgtttttccatcttcagcagttacttcaacaactacaaggttcgctcctatatcaagttttatgtaatcagattgtccattagtatactctttaccatttatcttaatctttgctttgtcattttgtgaagtatacataactcttactttttcaatatttctagctactttaacactataaaggtaagtttctggatcaaactttggtgacattgttccatcagttacagaaagactagctaaattaacattatcttttggatatcttcttgtaatatttaatacatatgtattactgtttcctttagaatctgtaacttttacatttatggtatttccaccttcatccaaacttatataaggcgaagttgcaccgctaggtactttctttccattaaccgtaattgtcgcattaacatcctctgctgttggagtaacccctattgatgtaacactattatcgacggttcctgaatattcatatattcctttattaaaagcaggagttagagttcctgatgtcagtgtcaacccaataagctgagaacttctaaataaagctgtacgtgttactttaatattatatgtatttgtatccccatccttagttgtaacaataacttcgacatcattttctccttcgtctaactttatattttgacttctacttccactttttacagtcacaccattaactttaatagtagatgaattatctaccgctgttggtgtaaatgcaattgttgtttgagccgttggcacttgaagtgtatagtcataagtgcttgaattaaatgctggtgataaagtacccgttgatggcactaatgattgtaatttagcctctccttttttagttataatcaacttatattgtctagagatattttggtttgtcacagctatacttataacattgtctccaccagttaagtttacagtcgcctcagcagcgctgctacctccattagcagaaaaattcattggcgttttattattgtcgaacaactgaactttcgccattttaacatcagaatttacatcaggaatattgtagtttccatttgcatctgtttgtgtgaaaagtaaatcgtaagttgctttaccatctaatgtaacccttaaagttccgaacgaaagagaagaatctgattcaaacttcatctttattggatagataaattgttttcctgaactatctttcatagtcaccgtaagtgtaaaatcactataatcagttattgtatttactacataatcctttcctccacttgaatttggaattcctttaacattcataaaacttgagttactactttgaacacctacaatagaataacccgaatcagctaccaaagtgaaattttcacctattggaaggaattcacataaatatccatctttctcgtttccatcaatatttttagtttttccattcacatctcctatgtgaaattgcagaccttttacttgagtttcatcagttgcactagctttctgtaaatttactgtctgcataagtgtaaaaaatacagtaaaaattaataaataagaagtaatcttattaagattgattttttttgcactcattagtatgtcctcccatcttatgtttacgaaatttattatcatctatttcaaatgtatttaaataccagaaatagtatattcaagtttataaagtatataatctatactatatttattatcgaattttcctaaagtttctttaattaaataaacatagatatgctgcctttattaatacttatttcctctacaatatacaaatttccctggaaatattggttcctttttgacttttattctaatatattctgtattttctactataatgttacacaaaacttgcttttttcaaataattaaaagtcagatttagatatggtaattacccaaaattcacggaaccatcattattaaaattatatatatatccatcaatttctacaggactagtcctcatagcgccatcctcattaaaatagtagtacttgtcatctttataaagccatccacacctcatattacccgcgtaattcaaataataccagttatttttccaatacacccattctccagctttcatgctgccatcagcatttagaaaataccattgattattttcatttacccatccagtattcatggcgcccgattgctctagataataccactgttttccataatatatccaccctgttctcatactaccattacgctccatgaaataccaagttccattactggttatccatcctgttgccatcgtgccatcgtctttcaagaaataccacttatcattatctttaatccaaccagttttcattacaccattattatctaaaaagtaccattcatttttataatataaccatccagcttgcatttctccatttgcctccagatagtaccacttatcgtcatcttccatccaacctgtctgcatatttcctctagcgttgaaataaaaataacttttatatttattgtcataataccaagtatttttcaaacacttacctgcggtatcattatacctccatcttccattaactattacccattgattaggttttattattgaattaattgtatcctgaacattcggtgttaccggaatacctaaatacatgtttaaagtataattcccaattctttgagtatcatcatctttaacccctagattaatagtatattttcctataccattaaacttaacctttatagaatcattacttaattgctttccattggctgtcattgaatagtttccatcctctggagttgcctcaagctccatcatatttgttccttcatctagctctatattatagaaattggtgtttttatcaaatccaatattactatcatttatattaatatcctttagataaacagcatcttttcctcccttataaatatacacattataggtagatgttgcatcgctcctattatctaagacttctatttctaccttatttttaccttttactaaaggtacgacttttctataactatcatctctagttactatttctccatcaaccttaaccgtatctagtaaatcatacggtttagccttaattaacacttgatcaatatcattaccaacatctgtgacatatgagtatttatcttctgaaaaatcgagatttcctccatcacttaaataaatatcttttaaagaaggattatcttgttctgcataaacctttgtcataagcaaattcaaagagcttgtctgtaaaaatgaaacgctataaataataaaaaatgttgaaattatccttctgaccattttactcatattctgccccccttttgtcaccacttaatatttctaaactaaatctctatatttaatatataaatagagtataaattctacagatactcacttctatatgtatattaataagctgtgaatccaatatgattaattctatttttatatttcttctaataataatgttaccattataatactttactgtaaacgcggatgaataatcttaaatcttaattttatattaattttattttaacactttagtaaaaatactatttaatgataccacaaaaaaactgctcataacgatttaaataaaccattatgagcagccttcattacctatactcacttttgaataaggaaattattcaaaagtaatcttttatctttagtattatgttgtagaagttaaaatttattatctaaacttctatttattttaatttattacttaatccaagctcctgatgctcctaatttgtatccatcaacagttgtgttagctaacattgctcctgatgaatttaagaaataccaagttccattatcatttaaccaaccagtagacattgctcctgatgattgtaagtagtaccaagttccgttatcatttaaccaaccagttttcattgctcctgatgattgtaaatagtaccaagttgatccatcttgaatccaaccagttgccatagttccatcagctttgatgtaataccaaactccaccatcgttaacccattgtccttttacttgagttccatcagtattgtagaatgtccaacctgcatcagtcttaacccatcctttatttacaactggagtaggatctgttggtgtagttgtacctttaccaccaattactgagtaaacatcatcttctttactccaagctacgatattatcttggttgtatactgacatttgatcaaatgatccatctactttgtatacttttgtccaatcttcatcattatcccatttgtagatgtatccagcatctaatctccaaaggtttccatctacatctgtatcaacagcactcttagtaccattttcttttacatcttcacttgcttcatcgcctaaatcaacatagtaataaccgttctttgagcttaatgttcctgtagcagtctttacatttgtaccattagcagtataaccaactatttttccgttagcaacagtatagttatcataagcgaaagcttcattttttccatcttcatcagaaactatataagttgttactgatttagcatatttagctccatcaacattacctgaagcttgtgcttttgatattttttggataacattgaatccaactgtactagcacttgatcctaatgtaccattgcttacagtaaatgtatgtccaccatcaacagtaacatccattccatttattttagttattgtagctccattagcagcatttacagtaacctttgctgttctgtatatgtagtttgcatcttgtccaattacttttcctgcagaagtatcaacacttgctgaaactttttcttttccagtagcatcagaagtaccatcagcatcataagaatcatctgtattagctatagttactgttttagaagttgttgaagatgcagttgtagttactttaattgatcctaaattgtaatcagcatcaatgtaatttccttgagcatcagtataaacatttaatttagcaactgaaccgtttgttgcattatcttttgtatattcaaatttataccaaggagctgagaatttatttcctgcaatttctgcgccagctaaatcttgaattgtttcagcttcgcttgaagcatatcttttatcattatctttcttaaggttctttcttaaagctgatgctgcatcatcttctgcattttcttttatagattcatcagttactgaaccattatctaagtcaacaaagtagtcaccatcttgtacttctaaatatttagatccataaatatcagtatctgctccactatcaatatctgataaattattgtatttaccatctgctaaataataagctgcttcgtctttgtcattaacttctccatcaacatagaacttaccatctttatatgctactgcatcatagatagtaccttcttgtgaatcgatttttgtgtagtcagctgcatgtgcaggtactattgaaataatagcagctgcagctactagtaacgatgttgctttagtcattctttttatcatttgtatattcctcctagagtttcattttttggtttattaattatttattagtttaaaaataatatcttggtttaaaaatattattctggtttacgaatattattatagcaactttatttatgcttgtctacgtctttttgtatttatttggaggtttttgtcgatatttttttaataaaatattagtacttgctgaattttattcttttattgtaaatctacatacttaactgtaaaattaagggccaagtttctataagatttacttaataaaataccaatatttgagcacaattatactaatctccaattaattatcttcatatatacgttacctggttgtaattaatatattaacataagcattatatatgaaaacaggctacaaaagcttgactttaaagctttcctttagaatgctaagaattttacccgtatctttattataattgaatttccttaacaattcctgaatgattttaaattataggttgaaaactcatggtattagtgtaatatacattcattaattccactttcctataacgaaatacaaaaatcgacatatgattttctactttataatatcttacacttatagccgtccatgaatcctaattcattaagaccttatataaaacattctttaaactatctaataaaaatacttacatcaataaaatcataattctaattcctaaatacaatactcaattgatgaagaaaccttgtttaaagcagaaaagactatcttttaggcatgccaataaaaaatataggttatgcacctcccccatactaagtgcataacccatatttataatttctattaaatatatgaaattaaagttttagaaaatttgtaaatatacttatctaataagttaaccctttatatttgatatctatatatgtaactaaacttttgactttatttcattaccgcctataagaaagtaaatgatccagctaccttcttattaataaatactgctaatagcttcgaggctattttacttttattttctttactctctccttaatgattctactggatccaaccttgcagctttatttgctggtagtaaacctgctaatgtacttattacaatacttacgataactccaagtattgcatattctctttttattaaaactacacttactccaaatagtttatttgacataagatttattcctctcataattaaatatgctccaactaaacctattgcgccactaaaaaatcctattaaaaaagcttctgaaacaaaaattctacgtatgtcttttgctctagctccaattgcttttattattcctatttctttagttctttctacaacacttatgtacataacaactattatcataatcgctgatacaattaaagatattgctgcaattcctgatagtacatatgttaatatatctatcatttgattaaacatagatgccatttgttcctgagatgattgtgaataaccaagttcattaaccttttgtttaatttgagaggtatatttgctatttgttgtgttaacataaatcacattaggtttcaatttatagccgttatctgaatataatttttctaaatcagcataatttaaaaaagcagatttcatatttgcagttaaatctccacttgttgtagtataaacgccacttacaataaagtctctatttaaaatcttttgattagcaagtatgcgtaaattcactttttggccgataatatctttacccaaattatcgcttaatgctttattaattaatacttccccagctttaggtaatgttccagtttcaacattagatgtggttatatttgaagatattgttgaaacgttcattaaattattagttttattattatatactaatgaatttgccccaagagaaattatactatagcctctttccacagaagatacattttctatttttgataatgtatcaatatcgctttcttcaaatggtttagtagcattaacatccggtttctgaactgttgtgacatctaaatttatattctcatcttcttcactaggcatattaacttctattactaatgggtttacataattgttcatagtcttattaaaataagatttcactccatttcctaaggacagcattaaaattatactcattattcctatacttcctcccacagaaacaagtatattacgtggaagtttttctttcatattaacaagtgctaattttgcagatgatattaaactaagattttgcttttgctttctaatattatcttgtttttctatattaacttcattatctaattctatgaccttgttatcatcaattatttctccatctgatattttaattattctacttgaagcggatgctactctttcagaatgagtaaccataattactagctttccctttctagaaatatccttcattatttctaaaacttgaattgtagtttttgaatctagactacctgtaggctcatcagcaataattattttaggattatttattaaagctctagctattgcgactctttgcttctgaccacctgataattgacttggtttcttatttatatgattctctaaacctaaatctcttaatatttcttttgcacgtttcaatctttttttttttctaacattagatagtgtcattgcaattgtaacattatccaagacagatagatgaccgattaaattaaaactttgaaaaatgaatccaacttcattttttctatatttatcaagctcttttcttcttaactttttaatatctttttcatttacaagtaattctcctgaaaaatcagaatctaatccaccaattaaattcattagtgtagatttaccactacctgactctcctataatagaaactaactctccagcattaaaagatagattaatattattcaatacatgaaatttatcattatcttttaatctataatacttattaatacttctcaactctaataaagccatttttcttatactccttattgattttatcaacagttcaattctattttctcaaaattatctttttcaatagtctatattcttttgttatgtataatcctatagagtaagttataattccaataataaatttaaatattgcacttactaacatattgtttattactattttgcttattaatatatatcctacaaccattaatacacctataataagaatgttctttaattgtaataaaaatgaaataaagcttttttcaaatacctgagttataagtacgtaaaaacattggataaagtttaatataaatgctataactaatcctaacgataatataattaaacttctattcattattcctgtaactattgcacttacagtgaatattgctgatactactcctgtagaaaataatttatcaacataaccagtagcttgaaatattgatccaatacttgataataccatttgtatcacaattgtcactgataatattctaaatattggtattgatgcatcccaattaggaccatacattatgcgtattatttcatttgcagaaaagaagcaatatacgcttataaaaattcctaaataagcaagaacttttataacttttatatatgtttcataaattatatccttttgattctgatattcagataatactggatgcaatacaggcgttattacgttcgtcaaattttgtactggataaagcataagcttatatgatttatcataataccctaaagttgatgcgcctaagaacttaccaattaatatgttatctaaattccttgtaaaataatttataaaattaaataggaattgaaagcttgagtaattctttatcttttttatagaaccatatgaataacctttacttatttttaatttacatgccataaaacacaatacaaaaataaataaactttttaatatagaatcaaaaactaatgaataataagagaatcctttaaaggcaagagatattgtcaaagttccaactattacatttacaattatatttattattcctacttgtttaaatttttgagctttatataatatagcatttggtactatattacatataaaaaataacacagaaaaagataataatcctcccaatcttatatatatcttatcattataaaaataagctataaaataagaaaaaaagtaaaatccaattgctataactatagatccaattatcgaaaacttaaatatatctgaaatctcattttcatctaaagatttattttgtattatagcgggtcctatccccatatcaccaagcatattgaaaaatgatataaatacagttattactgcaattatgccaaaatctgctggcatcaataacctagctaacactgaatttataattaactgtgcaaatatattgctatatttagatatgaacgtaatcattattccactttttaaatttgaatactctctcatgattcctccggttataaatacttacatcatgcatctattgtttttctataattttaatccactgtttaataatattatctatcttaaaatcttgagctctttttatagattctaatgacatacttgctcttttctcatcattttctattaatgatataatctcatcagcgaatttgttaatattataattcccaactaaaactccatttatgttcggcttgcttattatttctttaggaccagaattatcaaaagccactactggcaatccgcattccattgcttctgtgatagctaatccaaagccttcccaccttgaagttgaaacaaaaattgaagattccaaataatgatctttaacattatcacattgaccaagcaatattacattattttttagattatacttttcaatatgatttattagactttctctatcaggaccttctccaactatttttaaaatccaatcacttttctttttgtgaattatattaaaaatttcaataagaagatctaatcccttttgctgctctagcaatcttccaacaaaaattatacttttcttatcgcacgaagattttttattgcattcaaaacttagagggttataaattactttgcaatctattcctagcttttctttatatctaatcttgtcatcataagttaaaactacattataatttaattttggtatatatcttttaaacaactcgtcttgcttccaataatatttgcccttattatttaaatacgcatcataagaattatgcatccatcctatagtcttaccatttaacttatcacttatttttccaagaactatactataataaccttctatacctatgataacatcataatttcttgtatttagataatttataaacctatcttgaatttcattagggcaatatccgtaaagtaataaatcactcataacagaattatttaaaattccagttatagaattcacctctctagaaatcttacatataactttgttagtaaacttcttatgtaacagctctgaattaaactttatacttacattagaattcaaattatacatttctctattaactttaaaagttctatctgtacaaattacatcaactttattatttttacttaattcactagccaaaacagatactactctttgaactcctcccaaattaaaaattgtggtagttataaaacatattttcatagtttctccttataaggcacatgaatgaaaataatcgaccaattatgcgaaataggaaaacatactagtctattatttttaaaattgcgcctgagtacataataatattttcttaccaaagtctctctaccttaaatctatcatctattttttattttcttcagaactgggtataaaccacaattccataaaaatagctttaatttatcgtctttagatatctcatttaaaaataaaaaatccttatttttcacactcaattcattatatttactttccttaaaactttttagattattctcctcatgtgcattagtgtagtgagctatgaaatgagataatactttgattctaaaaatgtttaagcttttcttatctacttttatatttttatcttctatataatttataatactgctcatagcgaaataataatcttctgcgagcttagcatttttcttatgaactgtagatgttgctctttgtctatagtaatacaatggtttatctataaaagctattcccttacttaaatgtattgctttaaaaactggaaatgcatcctgaatatatctatgaggttcaaacttaaactcaatttgttttaataattcagttctaaaaaacttattccatagttgaccttgtaattcataattcagcataagattcataacctcataattgttatatattcttcttggatctatcatatatttctcaatatagtttctgctatctttttcatcataatatacgtaatattcacttattactatgtcaacattaactttttctgctctattatacatattctcaagcatatctaattccaaaaaatcatctggatcaatatatatagtatattcaccttttatataatcaaatgctgtgtttctagcaacagatacaccttgattcttttgatacaatatagtgaagtcttcaaatttatcttcataatctttaactatatccatagttttgtctgttgatccatcatcaacaatcaatatttgcaaatctttatacgtctgcattaaaagactatctaaacattctttaatatactcttcaacattataaactggaataataatacttatcatatatttgttctccttgaaccactaagatattctatactaaattatttattaccacttttttgattattatcagcattcatatataagttctccaagtttcttgatattgctctagcgctaaaacctgactttataatatcttcagaagtatcctttctgctatatccatctttatatttcagaattatctttgcccattcctctggtggactatctaaagaagcagatttccaataatgagttatttttatttcattgcttatagcatcagaggctacagccatcaaagctgcggcctgaacttctattccaaccactggaagcccctcataatgagatggaaaaacaaatatatccgacgcttgtagaatgttatgaatttcattacaaagtccataaaatattactttatcctctaaattcagtgatctaaccttatcctcaatcttttcttttaattctccctctccaattagcaatagcactgaattactatattgcttattcacagaattaaaaatatctattaagaaatcatggtttttttgatagctaaagcgccctacatgagttaatacaaatttgtcttccaaatttaattttcttctatattcttttcttatcccttcattataaataaactttttttcatcaataccattatttataaccttagccttttcatctcttacatcttccttggaaaacatccattgcgccgcattagttgagcatgcaaattcataatcaactacatatttccaaaggcttcttatgacattctgtattcctaaatgtaaatgataaaacctcttatctctacttattctatcattatgtgaatgcataataattgtaggtgttttacatatcttaaaaacagttgcttcaaaaaagctttttgcacgatcgccgtgtatatgtactactgagtattttttgtctttttgtaatctatataaatctacaaaagattttagccttttaatcccagtatttttttctagacatattatttgtccacccattttctcaacactttcatcataaaattcagtttcttctttattcttatatactacataatcaaacttaactttatctaaatgcatatttctatttatatttaatataaaggcttgaattcctccagctcctaatgaatccacaacttggagaactcttaacgttttattttccataacaaccttccttcatctgatatcaggcactataattatcattcacatatatgaagctctgctttctaagattcatgagtaaattcttctcatgaaatcaagcttcaattataaatagataattaatttttatcttattctatactagcagtaacacattcttgcgaatcactgtctataatattgtttcctaagtaagtagcaatcacagcaaaagtaaagcagcctgttacatccgtaaatatagcttctgcagtagatgctattaaaatatataatagcagcaaaaatgccgctgattgaatttctctattatactgatatcttttctgtattgatttaaatatattcaatataatccataaaaatataattaaacccaaaaagccaaattgaccatatacataaggccaaaaagtatcaccaatatacgaatgagcggtttcctctaatccactaactacatttattccatattcataatatataggcgaataataatctccggatatttctgatgcaaaggttccaaaaccacttccaaaaggtatatatttgcaagctagtttataacctactataaatagcgctggccgagcagctgtaagataatatgatgcatattccattattttgttatatgtcgagaagattcctatgacagcaagtatcaatatatatcttatttttatagatttagcatatttcataactaatttcataaagaaatatcctaatatgaatacaaatgctttatttcttaatgtaaaaaataatatagctattgattcaaaaataataaaattatcaaacttttttctattatcacttaatattacacataaaaatattacaattgctgaaaccaaatatgttggatgctgatatagaaatttataacttcttattccatatcttatatctgatgacattcctatatcatgaattatgtttaaaatcaaaaaagtaaatattatatttacgtaaattcttgatctttttgctaccttttctaacaacaaatctttatctatattatttgatacaattagcgtaaatgtgtaacaaactacaaatttacttatagctaaaatatctttatatatagcaatcttctctggttgaattttatgcatgacgtttcctgctactcctacaagcagcaaacaaaaaaataaaattatagatttgacttcactagaatacatgcttattttattttttccattaaatatataaaaaactgatagaattatcagcataaatgtgaatagctcatcaatatgccccaattgtggaatatacgcaattagacaattttgaaagataaaaatatcaaataatacattcagaacgaaaagcatctgttactcccttcttaagcataatcaaaaaataacaaatccatctgctaagcctatttcccattatgctatgttagcagattaccctaatagcccgctatgagaccaatctgcttccttgcctaatgaaaataatcatagcattttggacttgttatttttttatatgactgaatttaaagttctatatatagattacccaaaagttgaaattatatattcatctttggataaatataaagaaaataacagattaaagagacgatatatatcatctaatagagaagaatttgactagtcattacagttctttaataagtttagcgggaaccccaccgtaaacccctttattaacaatgtttttagttacaactgaattggcagcaacaaccactttgtcgcatatatttactccacgtgtaatagtagaattacatccaatccaaatattattacctatatttatttcattagtattatatccttgagatattattggcttatcgctaatgtcatagcgatgatcatgatcaaaaatccctatattaggtccaaataaacaatctgatccgatacttattttttctaaagatactactttattattagtattaaaaaatgtattctctccaatataaatacttccatttatacattcgaagctgcaataatcttcgatataaacattattgccaagagataatacatttcctttacttattcttatttttacacttttccctatataaagtgattttaaattcttaatttcaaactcaattctattgctatatcttatttttaatacaacaattctcattaatgatcttaaatacttaataccttttccaatcatcctttatttcacctaacttaaattataatcaaaaaaataacaaatccatctaccaatcctgttttccattatagagggaactcgacttgttacgctccatgagtaagcgatttacaccaaatcatagatttgggttctcttcttaccagcagattttactaatagactcgctatgagttcaatctgcttcctcacataatgaaaaataatcatgacattttggactcattattttctttcatggcttaaaatttctttatattctttaagatgtaatttaaaatatatctctttattgaatttagtattgaaaatttcaaagcaattacccttcatataagaatatttttcttcatcttcatataattcaagtattttttctttaaagctttcaatatctttagcctctactaaatacccattatatccgttttctatttcttcatttgttccatctatattggtagctacaactggaaccccttgtgaaaatgcttctaatggagttagtggtaatccttctatataagaacataataataatacatctatatattttaggtattctataatgttatccttcgcacctaacggataaatataatcttctaatttctctttctttataagttctttaatattgcttaattctggtccatcacctattaatacaaactttattttttcattttctaatgcagtactttttgcgatagaaataaaatcatagattcctttgtaatctactattctacttacctgagctgctataaagtatccttttttctttagctctaaaagcttatcatcaacttctttactatcatgctcagtttctacagtattatatatagtttttatattcttttcttctaaaccagccttttcaattaaaattcttttagctgcttcacttacagttattgttttaatgccttttaaagatacattcgttaacttaaacttatcttctatacataaatgttgagtatgtattactttaactttagtaattttcgatattaatttagctaataatgttgtcattctatgatgactatgaattatatctatattttcctttttcaccatcttatatatggctattaagttatttaatataatatcgggattcttggaatctgtatttaaaatattgtagtgtttaactcccattttttctaaatccttagttaattcaccgcccatacttgcaactataactttgttactgctattgaataacttacatagttgaataatacatttctcaactcctccaaggcccatacctctgttaagatataatatattcatcaataatctcctttatttatgaatgctgctctacattatctggccgattacattatcaaactttctaatgaagtcatttttattagaactatatgtattacattttgccgataattctttataattacttattacgctacataaatcttctatatcatatactccaatgatctttgaatttttatctaatcttttggtaaaaagtatttgatgatcatcaacatgttcatcaaactctggatctcttggcactacaattggaaccttattatattggagaggatgaaatatacttcctggtcctccgtgagttatgattatatcactttttctcacatattcatccatttcatcatatccaatcattttcttgtattcataatttttaggctcataattacagtacccaatttgagcaaatacttcttctttaatatctccactttcaattagtttatccaattggataaataatctttccatgccttgttcatgtgttcctactgttacaaatatcaaaataatccctccaatacttgtcctcttgggtaaaacttcttttgttcttcccattgtaatataaataaatcgcttataggataaactaccttccccgttatagttggtttttctatcctatcatacacttcaatataaacaacttttgcaccaaataatttcccaatatagaaaaatggaattgcaggcgctgcaccagtgctgacaattaaatctggtttttctttaagtaatatttttattgatagaagtgtatttttgattaaattttttatatttctatttgtaggaaaatagcaccaatattttttttcgtctttaagtattgatttagaatcttccttttcaaaggttacccagaatctctccttatctttccaccactcttttaattggattaaatgagttaagtgaccaccacttgatgttataaaacataccttcataatattctcctccttaaccatttaaaaatttaccataccatagttagcattctttaagctatgagtttaaatggagttaccatgcccatctgaaaagtttcatttaatttcccttgctatattaccattgctgtttttcctttacttaaagctttttcttctaaattcaatacagattttcttccaattgaataataatctatttgtctttccttagcctctttaattttataacaatttctaccgtcaaatataattggagtatacataagcttttcatatacacttagatctaaagatttaatttcattccactctgtaaatatgaatgtcatatctgcatcctttaaagcttcttctggagcatttacgtacttaacatcagtgtatatctttttgaaattctcaacaccaactggatcatatgcaattatttcagcaccttcatctaataatcttcttacatttggtatagatggagcttctcttaaatcatctgttccaggcttaaatgttaatccaagcacagccacttttaatcctcttaaacttccaaatttattcttagcttgtctaaacaatttatatttttgattctcatttacttctattgttgcttttattgtttttaattcatatccattatcatttgcaagccaatgaagtgcttttgtatccttagggaaacatgatccgccatacccgattccagcatttaagaatttatcaccgattcttggatcaaagctcattcctttagctacatcttcaacatctgctccaaccatttcgcagaagtttgctatttcattcataaatgatatcttaagtgctaaaaagtcgtttgatgcgtatttaaccatttctgcacttcttctattcgtaacaacaattggttgattatagcctccataaacctcttttaaaagttcttccgcctttttagattcaactcctattacaattctctttgcatataaagtatctacaactgcggttccttgtgctaaaaattctgggttcgaagctacttctatttgaatattatttttaacattttcctttaaaaactcttcaattctatcattagttcctattggtactgttgatttaaccactactaaacaatctttttcagcattttcagcaatttgtctacatacattaaacacataatctaagtttgctgaaccatcgtctctttctggagttccaacccctatgaatatcaaatcagcatctttataagcatttttataatctattgtaaaatctaatctgccttcatcgtgacttctttttaaaagttcatctaatcctggttcgtatattggtgaaattccttgtttcatcatttcaactttatttttatctatatcaacgcaagttacattatgaccaatttccgaaagacatgctccagtaactaaacctacgtatcctgttcctgctactactattttcatacttacctccatatattccgtaattctaattgattaaatttatttactcccatattacccatagctttagagacaatagatttaaatttattatttcctctaatgcgccctattaatgtataatcaaaaaacaacacgtccatatgcctaaagtcacttaacttgcatgcttgtctccaaacagcacaaaaaatgttttaaatattaacttaatatcaactaaagtgtttctttcccttacatacttaatatctagtttcatccaatcttcaaaatcaatatcatttcttcctgatacctgccagtaacatgttaaaccaggctttacttcaagccttgtcatcatccaattatcgaatttttctacttcttttggaagagatggtctaggtccgactaaactcatatcaccttttagaacattaaacaattgcggaagttcatctatgcttgtctttcttatgaatttgcctatcttagttactcttgggtcatccttcatcttaaacataggtccgctcatctcatttttatgacatagcttaccttttaactcctcagcattagcaaccatagatctaaatttgtacattttaaatacattaccgtctttaccaatcctctcctgagagaaaattatagatcccttagattcaagtctaattaaaattccaacaattaaaaataatggagtcaagattattaatccgattaatgaacaaagtatgtccataactcttttaaaaaagtaatattcaatcctgcgttctataccttcttgaaaaatgaattctcctttattaacctttacttgttgcattttatcaccacctcataagaattaatttttagctaaatactttagcttttttaatttatatttactttgataaatgacaacattttttcatttgttgattttattttatagacttttataataataatattttgtatttctgcacttcttactaaatatcttaccttgtatgtctactataattcaacgcacaataaacgctatattaagcaataaaaaggttagttgctaatatagcgttctatgacaaatatttaatttattttcttttttatggcagctgtgagccaaaagaacgtcccccttgccttatttattacgttctaggcacttcaaaatattatttactttgacttagttttaaaaaacgaaaatattgatttctttatcttaactttttttccaacgaaatttataacttcattattgatcagctttttagagctctcttcaaagatatttttatttattatttcattattattatcatctaatgtatttatagcttttcttatgccagtagttctgttatctatgtcatgagcatcagaaccaataaaattatatatattattctctaaaaatatatgtgtagtttttctaatactttctccaaatctacctgttatacttcctgcattcatttgaaataagtatccttgatcaataaatccattaataagtgaaggatcttctctaaatggcttatatctttctggatgtgctattataggtgtgatatttctaacctggagttcataaagggtatcaaatatattatcatcaaacttatgcattgaaaattcaactaacatatatcttgaatcatttattgtccctattttaccctccaaatagttattaattatattttcattaaaataaacttcctgtccactatatacttttatatttataccttccttatttataattgagttaacttcttgtaccagcgatttaacttcaccaatagtagcttccccgtactctaataaataatgaggtgtcgcaactatttttcttgttccatctttttctgcatttcttagcatctctaaagtcatttccatatctttagatccatcatcaattccaggtagtatatgagaatgaatatctatcatgacctcacctcttttagtgtataatttattttgcggatactaaactttgaacttaggattatgtggtgattagccgaaatcacatacatttttattccttatattataaactaacatttgttcactataaattatccttgtcttcatcatttccataatagtaagaatattttcctcttgtattctccaccgcatgtaatactgttcctattatattagctcccactttatccaaaagattttttgcatccattactatatctctttttgtttctcccgcccttataactaaaatagtcccatctacctttgttgatagtatttgtgcatctgtaactgctttaagcggtgctgtatctaaaaccactatattgaattctacttttaatctttctattaaattgctcatagcagaagatgataacatttctgatggatttggtggaatcttccctgatgttaaaaaataaaaattatcattccttttttgtactgcttcttcaatggcggcctttccaagaagaacttcagaaagtccaatcaaatttgagactttaaaatttttatgaactgagggttttcgtaaatcgcaatccactagtatcactttcttttcattttgagcaaaagatgcagcaatatttcctgcaactgttgattttccctctgccatttctgcactagtaacagctattgttcttatttccttatcaaaggaagaatattgtatattagttctcaatgttctataagcttctgcaactatagatttaggtttatcttctactatgaagccggcatgaattctattatcaactactgttttctctaatttatatcttttcattctatctgctttataactcctcgcttcttctaatttatatcttttcattatttctagtgtatagccttttattttctctagtaacgacatgatttcacaccttcctaacatcaaaataaatttgctacattaataatcacaaagtacaacttgcatttgtttacaaataatttattagcataaacttcattttttaagagtagatgatttattttaattatctagcgcattaattgataaaaaatagaatttctatctccgcttttcctgtcaattcacatcacttaccttctttaaataagtcaggaataacacctaaaactggcaaacctaagatttcctctatttgctccctagttttaaatgtattatttaagaactctaataagaaacttgctccagcactgcctatcagaccaagcaaaaggccgactcctatatacatctttttatttggactgactggtttttgaggtaccttaacactttctacaacctttacgttaccatttggtataaactctctagatgatcttataaactcatttgtaactgaattcactacatccccagctaatgcttggtttgcactcacgtaactaatttctaatatttgtgtatctgttcttggcgtaactgataaattatcaagaacattttctgaatttaagtttatatcacttgagtctatggccctttgtactaaatcattggtctttattatttctgcataagtctttatcagtttttgatacatttgtacatcattagtgctatagttttgatcctgaccagtggtattttcttttcctataaagactttagtatttgcttcatatttaggtggaattataaaatagcttataattaaagctaacaatgtcgttactaatgttactaagagtatcattttccatctttttattattggatttgctatttcatcaattcttataatatcgttattcatcatttaaacttctccatatacaataaatttttcaatagtcctaaatacaataattatatttttagtaatttccttctctttcattcatatttttaaaataaaaaaatcctaatggaaaatttccactagaattaaccttttaaaaccaaaaataaaaactaggctgaaaccaatagttttagcctagctaagatatttccttctaaaattttagagagtaattttactcatcaatgcgttttttcttaagtgtcacgagttttctatgctttctaattttagaccttggtttgatatttaacaaatctaatacaaacattaaaagaggcactccaagtaataacccccagactcccataaaatgctctgatactaaaagtgtaataaatacgacaaagactggtaattcagttttatctgccataaaccttgggttcaacacatagctctcaagtgcatgtaaaactgcgataattataagaatatataaaatcattttaaaaccgccaactgtgtatgctattatacttaaaggtattaacgatgcaattgttcctgcaactgggactaggctaaataagaaaatcataactccaaggcctaaaacttgcggaaatcccaatgcaaaaagagatataacagataaaatactattaacaaatgcaataattatttgagcttgaattacttttccaaatgaattcaaaaaatttattccaaaatcttttgtatacctatataatatggcaatcttactatcttgaaactctgagaaaaattctttgattttctctctttcaaccataaaaaagaggcttaatattaaagacacaaatatattaaaactccaggtacctatatttgaagcataccttaagaattgatcaaaattcaatagctcatttatctcggaatttctaaaaaatgacataaaatcaaattttccaaaatacggaacaatgtaagtagataaaacttccccaccaatatctctaaaatcaaatctagatattttcatgccaatctctgtaagctgtctaataattattggtatatacctatagcttgcaaaaataataatagatgtcatgaatatgtataaaaataacgttactattatcggtttcacctttataaacttatctaaccgtttcgtaattcctacttgtagactgtatgcaatatatgtaaagaaaaatgtaagtaaaaatagattaagcattgatcttaatatatacataaaaaatacaataataagaagaacgcaaattcttctgactatatcttttttaaatagttctcttaagaaattcacatcttattcccccttctagtaattattatatcctataaatcatatgcttaaaacaagaaattccaataaacctttccatattaataaatttaaataaaatagttatgttctggaaccatttacctcaatattttaataaaatcttaataaattgcaattattttgcaaactgtttgtagtataatataagttatcggataatattcaataatctattctactttacaaaaaccatatctatagagtaggcataaaggaggatacgatgaaaaaaaataatagaattggggcgatagtagcttcagcgctacttattacgtcaatatgcaactcagtaccggcattggcagaccctaatgatagtaatttaacacttgagcaagctatacaaaacatacaggaatacgataatgaaattgaatacaacatgggtaagttaaaccaactaaaggggcaaattcttgaaaaagaaaatgatataaaagataatcaggtaaagcttgatttaacccaaacacaatttactgaaagagaaaaccagttatctgaacgattaaagggcatccaattcaatggaggctttgaagctacgccattacaatatttagacgctttattttcttcaggtgatattttagatgcattaaaaagagtatcattgatttctcaaatttgtacaagcgataaggatttaattttagaaaccaaaaaatcagaagacaatcttttaaacattaaaaatactatagaaaaagaaaatcaagaattgcaaactgataaagatgatgttgaaaaacaaattaaagacttggaagataaaaaagatactctcttaaaatatgtacaagataataacgcactattaactggagatataggaattactattcctgtaacattaccttctgatattacagatcaggctaaaggtattatagaagaagcagaaaaatatttgaaagttccatatttgtggggaggggaatctcctgaagggtttgattgctctgggcttatgcagtatgtctttaattctaaagggataaatataccaagaacatcacaagaacaacaaagttttgccaagcctattaccattgcagaaattaaacctggggatttagtgttcaataaagtttcagattcaactcatgtaggcatgtacataggatatgatatgtatattcaagctcctcatactggagatgttgttaaaataagtaagctaagtacctcaaatatgaaatattttggtagagttttaaactaatattaacataaaactctagtaatccaagtgctaaattaatactgaaatgtataagattaattgcaacatatatcaaaaaataagattatatactataagcaaagcagctagtttgattaaagaaactagctgctttattttgtaaattttcataagataatatattgtaatattttagtatttatagaatatatataaaatggtataatttaatcgaatacataattattgtggaggcgatttatcatgaacaaaaatgtaaaaaaaattattatatttaccgttataagtacagctttttatacatggatgccatcaactataagcataggagaacaatgcgcttatgcatactccggagatgaaataacatctttagatctaacatcagaaggttctattttgtcaatatacaatagtataactcgcaaaggagattatagagtaaaaaaaggcgacaaaattccagtagttatatattcaaaaattccttctaataaaactagctttaacttgagcaccattgaaactaaggccgctgatataagagtctttgttggaaatgaaaatataaagctaagtgatatctatggtaaaataaatatcgcagaaggtcaaagcaagactatttatataagactttataattctaaagacgcctctgatagcaattattccctagaatatgaacttgttgtagaaagagaaatgaatgatgaagataatattattgatgccaatactgaagaaactacagatgataatacaataactctaaaaaactatgacgatatttacttaaatcgattagttttattcgatcctagcaataatcaaatcgatttctcttttaataaaacagagcctgtgcagaatataaatgttgatgaaaatatatcttacattaatgttaaagctgttccggaacaacaaagctataaattatcaattaatgacaaagatttagatcctagtgatggtaaagatacaagactcgtatctttagatgaaggaaaaaatattataaaaattagaattataaattctgatcgtaaaactagagagtactatttagttgtgacaagaggtaacagttcgccagtatcttcaaataataacactactgtaactaatcaaaactctcaagctatacaagcagaagcttgttggcaatataaaaaatctgatggaactatagctgtagggtggacattaatcggaaatgactggtattactttgatgtaaccggtgcaatgaaaacaggttggataaaagattcttctggaaaatggtattacctaagagaatcaggaactatggctaaaaataccacaattgatggatataaattaggtcctgatgggacttatactaaataatccttttaaaataaaaaaactagcagctaatcttgtgtagaatacaagaactagctgcctaattttttaaataacttgtttactcacttctgatggagttgatgcataaatatattcatcaatgcaattaactacccaatctttaataagttcctctggatcattccttaacaatccatttcttatcttattatattgaattggcataaattgatttattaaagtcaacggtatctctactgacttcatattttttattaaaatattttgtgcgtatattacttcttctgttggaaaatagtatcttgatctatcagagtagctatattttctagcatatttaattttactgcctgctccatgataatgtttcctccaattgcttggatttttgatcattgctttataaagtacttaaataaaatttgaaatttctacatctgcatcatatttaaataattcattttccatatagctcaaagcgaaaagtccctctctaagtgcaaatgttaaagctggtccaacttttagtattgcgattccatcttcaaccattctcttcaaactatcagctgtctgataatctgtagaatggccttcaaatacaatattattataagatgctttactgaagatttatttttttatctgttatgataaattttttcttatgcaacaatttattttccaaaagcaatcccaccttatacgtattttttgtcaataatgatgaatctattgtacaggaaaatccacttaaatttaaatttccttgttttttcataacacttgtaacatcttttctaattacaacatctgtagaaaatataatattattactttcttcatcaattaatacaattttcttagaattaagattgttaactctaattccttcaataaacgcccatccttcaattcgtatgttactacctacatttattgaatctatacatgctttacaatcattactaacccacttattctttatttctatattaatctccaacattttgttaaactcaggtttgtacttaatatcataatcaactttacattcagtcaaatttgtattatagaacgggtcccatcctttaaattgcttgtgcttatcgaacaaaattttacgttctttcaataaccttgtcattttttctttattaatatcatctattcctctacttattgattcatgatgatataacgaaacatcattcctaacaacattatagtatttatgctctactaatttaaaacaaagatccacatcattataagccacacttaagttttcatcaaatccacttatttcttcaaacttatgcctttcaatcattaggcaagcgcctgttacagcaataaaattatactccatcctatttcttccataataataaactattctatcatcaaatcctatctgactatgtgatggtccaattttcaaattagtgatcccaatatgttgtataatattgctattaggatataataactttgcaccgactactccaacatgcttaagactagcttgtcccaacataatttccaaccattcttcttgaaaaatttcaatatcatcatttaaaaataaatagaattccccttttgctattctactacctatattgcacatctttgaaaaattaaagttcattttttcataatggtatctacaattatatttcttacaaatgtcttcatatttgtttttattttcgttattacttccattatcaaccaccacaatttcataattgtagtatgaagtatatttcttaactgattcaatacaattattcaatattttaaaattatcttttgaaggtataattatacttacaagtggtttctcatcatttgtatacttaactctatactgaaacatatcatttacatattcaacagtgcctttaagtccacgtctttccagagcctcttctttgcatcttttaactgcttgcaacgcatatggctttgcttctggatttgatgcaatagattcttctctttctctccagtgatataatattttatcaatatgtccgatttttttcgccttctcagtaaatcttagtgtaaagtcataatcctgagccccattaaactctgtacgtaatccatctatttcatctatgatgctctttctataaacagaaaaatgacatgtatacattaatgacataaaagtatctggagaccaatctggcttaaagaaaggagaatgcctatgtttaccatcagcagtcagcttatcttcatcactataaataaaatcatactcagaatcttcgtttaattttttagctacttcgtataacgcattaggagctagtacatcatcacaatctaaaaatgcaataaactctccattagcaatgcttatcccatcattagttgcacgtgaaatatgtccattctcttttctataaacaatattaattttaggattcttttcatacttattaagcacctttacaacactattccatgttgatgcatcatcaactaaacataattgccaattatcgtatgtttgatttataacagaccctatacattccactagttgctcgtctaaaacattatatacaggaacaactatagatatcaatggattaaaacttaattctctcttttcgaatatatctgattcattatccttaatccatttataatattcattgttatcagtattatttctgtttttcaacttcctatataacttataaagaaaagttattataccttcatctttcaaaatgcttaggccttttttaatatgtggcattttgttatataatctcatactcctaacctttctttcagattttattttctttaagtggaatttttttttcacaaaatacttaactatagggttaatatcttttctagcaataagcgcttgaggccaatatatctccgttctaatatttttaaataaagtacccaactttaatttcgctatgtacttcatttcattcttttgtgctacaaagccatccacatttggtagatttccaatcttaactgcttcttcttctgttggttcttctattaatttaaaaattcctcttaatgcatcttctggttttatttctatattatattttttagcaaatccatagatttcttttacatacgatagtatcccctcgaatatatcttgtttatgatcatggcttggttcaatttcttctagttcaggaccattttctccatatctccaaacagagctatgtggtgcgccaaagaaaagctctaataatacaattgaagtcactactctctgttctaaattgtagttaaattcatgaccaaacaaataactctcaaaactcttatttctcaattggcgtttacttttatcattattcattatcccagcataaataaatttgttttttttatggtattcacatttgtccaaaagcttatctaataaatattgagaacttccattccatccacaatcaaatattactgaattacttgaaagaaaatttaaattttcaaaatatttaattgcattttctctttcttctttacaatttttcaatatacttttctcatttaaagaaaataacctcttcatcttatcaaagtcagctctagtacttataatatcattaacactattgaatccggcatctcgtaaagtattttgttctatatcttctatattcaaatattccaaaatatccttaacttgctgcccataagtatatggtggaagattgtttagtgattcctcatctaatttatcaatccctgctaataataatgcccttcttgatgcatacatatagtgaatattatcgaaattaagttctttaaaaatattatgtaaaatgtaaccgtctcttgataaaaagtatatattatcatattcttctttttctaaacacttttccatccagtttaataagccaatgtataaaggcccaccaattcttgcaccaagataataccaaaagctcttattattattgttatttttaacaacattcaaaacaccatgatttataagattaaataaatttagactatctgaagatattttaacctcatcaaattgattacacttgtagtgtattgccttaattcctttgctactggaattagtgaaatcagagttaaagttatcaccaatatgcaacatttgatttggcttaattttttcaatattcaatatttcatcaaatatatctccaacatacttagttttccttaaatctgccgaaacatatatctcatcaaagccattgaatccacacttatccaaaaaacgcttaacatcctttgattttatatacatatcacttgtagcaattactcttttattagaattcttagcaaacttgtaaacctcaagtatttctttgttgcaaactagtgaatctaactccatttctagctcataatttttaacatattcccaatcaaccttcatatcagatgtctgcttaatgtattcatatatttcatctatatcagcatgcggaaatccatattctctttcaactttcatactcgccatttgctgacctttttgccgaatttctttaaaattctttatatttaaaatatagcctattaatgtaaatatatcttccggttcatttactattctaaaaattaatgtatcgaatatatcaaatgataccacgtctgccgcagctatactttcttttatcagctctatattcatgtttctacccttccattttcatataattacaattcaaagattttactttatacttatgtaacattctatctacctaataactttttggtcatacacaaagctttccatcctttactagcatgaatttcattaatatattgttccttattttttaattgttcttctttattctttagttgttcttctttattctttagttgttcttctttattctttagttgttcttctttattccttagttgttcttccataatgcttatttgctcttttaattcatgtatttcttctacttcttttgttagcccttcaattttataatactcatgttttaattgatcttctttttcttgcaaaaggctatataatctcactacaatttctttagatatcatttgtacttccagttgaacctctatcctacttgtgtttaattttatatcagataatactatctgcgggtcatcagttgaaaacaatatgaatttttcacttaaacttaatccatttgtaattgcatctaaagaataataattttcattgtaccctaatatactatcaatatttactatacacacataattagaaggatcaattctaatttgctttgtattagatgctaatggaatttcaattttcactttattattagaatctatctctggaataaacttatatgattgagattcagtaaatccattgccataatcataaaatacttgcatagttttcttataggaattttttcgctctcgttcaataacattttgaacattgatattcatttctgcgattgtagtatataaatctcttgttggaattaaggttcccaaaacgtaagattgaaagttcctttccataatgtcatattgtactatttcgtcatccgtaatccccattaatttatacaaccctagatttattacttcgtggcgtttagctgaaccgtacatatagtaatgtagagccctataaataataaaattaaagggtatggaaaaattaaaagaccactcataatctataatattccactttctccctactataatattactaaaaactaaatcaatatcattgatatcaccagctcttaatgatgatggtaaattaacatctccaaatatctttatgaaatcctttgtttttttaaattttcctgttccaattccagtctctatagtagatacatattcctgtattttatttactaattcattatatcttttcttcttcaatagttcatctaattcttcttctagcgtactaccctctatatattcaaattctactccatcatctattctgtggcacttatttatacatatctttgatcctttatacgcttctgataataatttataattttcataaatatcattaatatgagtattagcttcttgcgtaagtgctttcttacgaacaaatctattttctaagtcctctacaatatcagttctaattttaaatttgtcagccctatcattagaatacttagagtatataacattcttcacgtattaattcctccctttttccaaaactactaagtacgaattcgaatatataggaaataaattttcttttataatcatatcgtacactctagtttcatcaaatgtaataatacgttctctatcaaaattcctcatgttattattaagttcaccttttttaggcaaatacttatctgagtagatagttgttggtaatttataatctggatatggataataaaacttataattaaagaatccactattctttataatttcctctaattcttttttagaaaatgtttttactccgtttgtaattgggtaatcttctatgccttcaaagtacttccctacatggtcctcttgacaaccagcccaatattttagacctaatttattttctatagcaattataatttttccgttttcatttaagtgtttacctattatagttaaaaagttttcataaggtttttcagtagaaatatacttttctccatattcaaatacacctataagtgttatatagtcgtatttttctacaatatctttttcactctcctcaaaattgcctaaccaaatttctatattatctttttccttattcctataggcgttaataaggcttcttttttcagatagttcaatgcatgtaacttttttagctttacttgctaaagttccagtaatcgctccacatccagaacctatttctaatatagtatcttgctttgtaataggtaaccattctactatattagctctcaaatgagataaatgatacattatcgcccacttattacttcgagcaattatcttattatattccttttcctcgtgatttttaacaattcccaaaagttcatcttcaacttcaccatcactgtataaatcaacacctgagtaatgcttataattcaaagttaagtttccaattttctcattcatagtatgccttccttaattctactttatttttacttctgaattcatatcatagtagccaatcgaatttttatgtgaaactacagtgatattgcatacatcataaagtctatgatatacggtaaaatccccatctctatagccagtgcatcctaaggataaaagatattgtccaccctgtatattcatattttgcgtaaaacttatctcttttatgtctccttgctctataactgaaatatcttctttctctatcattgtattagtccctgtaatttctgtaccctttaaatctttaatcgtgaatgcaaaaataggattttgaattttcttattaaataagactttcattttgatcataaatatagttcctttggttatattatttgttataatacctgtattatccacgataccaaagtctattatctccgcaaatttattcccatactctagtgtatcgggattaactgtcaatgaccttttccattgacctttttcgatatatttattttgtgaaatatgatttatatcataactatcatcctgctgattcaccaacacttttttatacatatcaatagattccttgggatttccttcacaaatttttcttcctctatttagcaaaattaccctatcacaatacttactaatgcttcccaaatcatggcttacaaataaaattgtttttccttctgatttaaattcctcaaatttcctataacatttattttgaaagaaaacatcccctactgaaagtgcttcatcaacgattaagatctcaggctcaatattaatagctactgcaaaagctaatctaacaaacataccactagagtaagtttttacaggctgattaataaatccacctatatctgcaaattcaataatattattcacttttctatcgatttcttcctttgtgaaccccatcatagttccattaagataaatattttgaattccagtgtattcttgattaaaacccgctcccaattctagtaaagccgatattcttccatttacttcaaccctcccaagtgttggatttaatacccctgtaataatttttaatatcgtagactttcctgagccattagtaccaataatacccagagtttctcctttttttatttcaaaatttatatcatttaatgcataatgttcatgatataaaaccttccttgtaaaaaaaagagactcttttaatctatctattggcttatcatacaacttatatattttacttaagtgttccacgtttatggctatatcattcatttaaaatctctcctataatacatctgcaaaatgaggctttaattttttaaacacaactgctccaattgcaaatactcctaatgttactacccaaaaatatattgtttgaaaatacctttcataaaaccaaacatgatttataaatgtatctctatatccttcaactatgtaatacataggacttaattttaatatccactgatattgttgaggtaccattgtataactccacattattggtgttaaccacattcctacttgtaagaatatatttattatttgtccaagatctttaaagaatattactattgctgatgtagtatatgatattccaagtacaatacaaaatgtacagaatgagtaatatatcaattgcgttgtatatagagatggataaaatctatatatcgctgcaacaaaaaacaagaatactataaacactaaatgtacaaatagtgctgataatatttttactattgggagtatactaatcttaaaaacaaccttcttaaccaaataagtatactctaacatacaatttgtagcatttaaaagcgcttcctgaaagaagaaccatggtacgagacctgacataaaccatactataaatggtactcctttaataggagaacctgatttcaatccatattcgaaaacgaaccaataaaccaatatagttactattggctgaataaatgcccaaattattcctaagtatgatcccgcatacttagttttaaaatcattttttgataaactccatattaatgtcttgttattttttaattcttggattaatatcaaaacacttcttgattttcttaagacaatcgctgctaatatatctattaaaatacaacttcctaatttaattgcattatttatagaatcctcatattcaataagaccagatattaaagttgaatccattttatatactacatatggatcattacctatagtctgtatatttaaagaattgtttatttcttgcacttctccaatttgattttcgttattctcatttaatatttcattcaaatctatatttatactttttccccagcatgacaacttaatctctgatacatttatatttgctgggtgttcaccaaaatcaaatcttaaatttgttatatcttttggaattgaaaatttgagtgtttcttgtctatttatatttgtataactatttatttgcgactgttcttcactccatagcatgtcagttccataaaatacttgatagctatcttcttcattcgatactattttataacttaatgttatatttttatcatctatgttacaaaatttaaatattaatatatttgttataaaaattaatgatactaatattgttaatttaataaactttctcttattcatattatatatttcctcttatttcaattctattaagtatctatccaatgcgttttcccaattaggtaataacccaaaaccattatccacaagacttttctttgaaagccttgaattaaaaggtctttgtgcttttgctggatattcacttgtaggaataggatttactttacaacttagtccagcttttttcataatttccccagcaaattcagcccaagagcaaaatccttcattagtagcatggtacacgccatacttctctgaaactgccatatcgcataaaagtggtgctaaatctgctgtatatgttgggcttcctatttgatcacaaacaacatttaaactttctttttcacttcctaatctaagcattgttttaatgaagttatttccattaactccaaacacccacgaaattctaacaataaagtacttatctaaaacttccttaacctttaattcaccttcatatttagtctttccgtaaactgaatgcggttcaattttatcctcaacttcaaacggagtatttcctttcccatcaaatacataatcagtagatatgtaaatcatcttagcgcctatttccttacaagcctttgctatattatctgtaccatatacatttactttagcgcagacttcttcctcatcctccgctctatcaacagctgtataagccgcgcaatgtataacacaatcaggttttaattttccaatgcaatccttaactgcatttttatctgtaatatctaattctgctctatcaattcctaggcattcaatatttcttctatttaattctttaactacatcataacctaattgaccgtttactcctgtaactaaaatcatatatatacgctcctttataatatcccctttttagttagtctaattatatacttaaaaacaaattcaggcataataggtagaaatatttctaacacaattgatgctttgtaatatttactatattttataataatcttcaattcttttaatgaaggcttcaagaaatagcttcttctagccctgagagatgttatgcaataatttagatgcccttgcaactctccaatatatcccaatctgttttttaatgaaatatacctttccaaaacatcttcgattttaaatttacagtaagtatttttatcgtatattccttttaaaataccagtttgatttgaattatgttgtctatatctaactaatggtttattaacaaactctatttttccatttattgatgctataattgcaatccaattatcatggaccaatgaatcaacaaatggtattgctttcttagcaatattgcttcttacaatcattgcacaacctgtaacaaaatttctttctaacaaaccctcggttaaatcatatcctgatttatatattattctttttctaatttcagttatactatttgctgttttcgttccattttcatcaattatcgaaagatcgctgcatactaaagttacatcatcttccttaaatccatccataattatagatatcttatctttttcccaaatatcatcttggtcacaatatgcaaaaaactctccattcccaattttcgtaagttcctcaaaagctttattagagccttcatttgtctttcctcttataactgtgtaattaaaatttgttatgcacttctttaaaaaatcttcacttgttggaaaatcaggacaatcatcataaacaaatagctctagattattataagtttgctcgtttaatgaaatcaactgttctataaaccagttttcatttggtttatagacagctagtaatatagatactaatggcttatctacttccatacatcttgtcatagtaattctgatattctccactaataatattttcccaccaagttttattatctaaataccattcgatagtctttttgatgccttcatcgaaagttgttgttggaagccatccaagctcattatgaatctttgcaggatctattgcataacgcatatcatgccctttacgatctgttacatattttattaatgtttctggttttccaagttcatgaagtacagtttttactacttgtaaatttgtacgttcattatgtccaccaatattatatacttctccaacttttccttcatgaataattagatcaattgctctgcaatgatcttcaacatagagccaatcacgtacattttctccagttccatatacaggcaattccttattatttaacgcatttgctatcataagcggaattaatttttctggaaaatgatatggcccatagttatttgagcatcttgaaattgtaactggtagttcataagttctatgatatgcacccactaaaagatccgcagacgctttacttgatgaatacggacttgaagtgtgtatcggagtttcctctgtaaagaaaagatctggtctatcaataggtaaatctccataaacttcatctgttgatacttgatggtatctctttattccatattttctacaagcatccataagaacagccgtaccaataatatttgtttttaaaaatatttctggattttcaattgaacgatccacgtgactttcagctgcaaaattaactatcatgtcaggatgttctttttcaaacatgtcatataccgcatctctatcagctatatctattttataaaagctaaaattagaattatccttaactgatacgagtgtttccatatttccagcataagttaacgcatctacgcagataattttataatctttatatttattaagcatatagtgaacaaagttaccgcctataaaccctgctccacctgttacaactattttcatttttcacactccgttttcaatgtacaattgaaaattgacaatcgacaatttaggattaaatcccattgaacttcttaaatttaattcttcagaaagactacaaacttttcatccttcattgccaattgtacattgtcaactgtcaattctttaagtccattattattatttattatatataaatgtacaatcgctatctttaagtaatggtgcttttttatctttttcagaaaggataggattttctattccccattcaacaccaatttcaggatcatcaaattttatacttctatcactttcgtaattataataattatcagttttataaacaaactcaacatcatcagttaatgttaaaaatccatgtccaaagcctctaggtataaataattgttttttattttctgctgaaagttccacagctacccattccttatatgtaggtgatccttttcttaaatctacagctacatctaagacagctccttttacacatctcactaacttagcttgagcattttcaccattttgaaaatgaattcctctaagtattccttttcccttagaatatgattgattatcttggcaaaagtcacaagcaatttctggtgtttttattctagagtaagtttccataaaccatcctctttcatctccaaaaacttgtggttctactatgtaaacaccttctaatttagtttttatcaaattcattatagatacctctctttgattcattatttagaaattaataaataactttcccttcagcaacattttttaaatgttgtccataaggactctttccatattgctctgcgctttcaagtaatgttttcttatctatccagccattcttataagaaatctcttccaaacaagctatcttaagtccctgcctagtttcaattacttttacatattctgaagcttctgttaaactatctactgttccagtgtcaagccatccatatcctcttccaagtgttattacatctaagtttccttgttcaaggtaaattttatttaaatctgtaatctctaattctcctctttgggatggctttagcctcttagcgtattcacatactttattatcataaaaataaagccctgttacagcataattagattttggattctctggtttctcttccaaggatacagcttttccattaacatcaaattctactactccaaaacgttctggatcttctacatagtatccaaaaactgttgcacggcctttattttctactgcttttttcaaatgatttttaagtccatttccgtgaaatatattatcgccaagaatcattgcacaattatcatttcctataaattcttctcccaaaataaatgcttgagctagtccatctggagagggctgcactttataagataaatttattccatatctagatccatcacctaataacttttcaaaattaggtagatcattaggtgttgaaattattaatatatccttgattcctgctaacattaaggttgataatggataataaatcataggcttatcatatactggcaatagttgttttgaagttaccatagtcagtggataaagccttgtcccgcttccacccgcaagtattataccttttgtcaaaataatcacttcttcctatatacttttacttactaaaatttcaatatatcgcaattctatagaattttgattatctaaaatattgttcaatcattctagataaatgtgcttaactaaacacttaaaaattttcaagcctcttattaatagaaaagactttaaatttgaaatatatgcactttattcaacttctatactaaattttatcatattataaagaataaataaatgactactcctataattatacattggtagttagtccaatttattgaaaccctttatttattgcaaacttttatgtaaaatgatatcatacacctaaaatatgtatatgttttttgttatttagtaaatatttagacatttaaaacacaatgacacgataatgaagcagtttaaatttgaactataaaggatgatatagatgataaaggaaaatcaaaacctattgaataaatttaatgctatttcagatattataattttatttatttcaattacactagcatacttaattcgtttttatattttttcgcctgacacttattacataactttaactacatacattgaattttctgttataataattccaataaatctaattttgtttaatttttttaacctctatcactcttttagaacaagatcatttgtaaaagaatgtagcgcaataattaagtccaacacaattcttactgctgttcttctatcattgttatttgttctaaaattggtacacatttcaaggttagttattatcattttttattttgtgaatattatgttaataatggccaaaagactgattttaagaaaaatattatcaagaatgagaactaaagggttaaatttaaaacatgtagtaattgttggtgccggagaggttgcaaatgaatacttagacgttcttaaaaataataaaagctttggatataattattctggatatgtatcagatgcatctaatttccagggcagaaagcttggaaactattctgatttatataatgttttaaatgaatataaacctgatgaagttgtttgtgctcttgatctatcagatgcaaaatatttagaaaatatagtttcagattgcgaaaaaagtggtacaaaaatttctataataccattttgttataaatatattccaagtcaaccatatattgaccaactcggaagcattcctctaattaatataagaagaattccattagataacttaggaaatgcctttataaaaagatccttagacatactaggttcactttttttaatattatgtacaagtcctataatgattatcactgctgtgattattaaattcacttcaaatggtcctataatatttaagcaaaaacgtgttggattaaacaaaaatttatttgttatgtataaatttaggtccatgaaaattaattcacaagaggaaacaggctggagtaccgataatgatcctagaaaaactaaatttggttcttttatccgtaaattttccatagatgaattacctcaattctttaatgtattaaaaggtgatatgagcttagtaggtcctagacctgagctcccacattttgttgaaaactttaaaaatgaaattcctctttacatggtaaaacatcaagtaaaacctggaataactggactagctcaagtaaatggctatagaggtgatacttctataaaaaaaagaattgaatttgatattcactatatagaaaactggaatatcttaatggatatgagtatattgtttaaaactgccttcaaagggtttaaaaataatgaaaaaatcaggataaatagcactaagtctacaaataatgaggttaatttataacgaaacttcaatttctatttattcttatcaagaatttttatgtacttaataaaaactatcaagggagaaaaaaacgtgaaattatctattatcattgtaaactacaatacctatgatctcactaaacaaacaatagagtctgtaattaaagaacaccataactttaattatgaagtcatacttgtagataatgcatctagcgatggtagcatcaataaattgcaagataaattcagaaatattgtaacaacaaaaaaactccatataatcataaacaaagataacttaggctttgcaaaagcaaataatatcggaattaaatttgctagaggaaagtatatactattattaaattctgatactgtgcttaaagaaaattgtttagaaaaatgtatagcaaaaatggaaaaagataaaaacattggtgcattaggttgtaaagtagttttagccaatggtgatctagatcatgcttgcaaacgtggttttcccactcctaaagcctctttatattattttttgaaattgcatgaaaaaaatccatcaaagtatggacaatataatgcacttcatctaagggaagatgatattggagaagttgattgccttactggagcatttatgcttatgccaaaacttatttttgacaaagtaggtggccttgatgaagatttttttatgtatggtgaagatatagatttatgctataaaattaaagaattgggatataagatactctactaccctgaagcacaaatcatacattataaaggtggcagttctaaaaagaaaagatctaaagtcatatatgactttcatcaggcaatgtggatcttttataaaaaacattattataaaaagtacaattttgctgtgacatttcttgtatttataggaattgggttaaaatacttagttcaaatcataaagaatgcttttaagtaaaatcagcattattataaattctaaaaaataaagtactttagatatggtactttattttttagaacaaaatcgttttttactctgccattcaattcttacgctaatttatagatatatgcatacattgcaatagcttattctcaatgctataatattacatattaacatttgtaaattacaaaaataaaaatattaggatgtgtagaaaatgacaaattccagaaacaattctaatgaaaaatcttttaacttttttttgcctattgcatttatattaagtattgtacctttaattgtaagaatggcagccgttaaacttgatgaaaatctaattaagatatggggcacaacagttaaaacagatttattttcacaaagaaaagctcttcttttaataatattttccgttatattaattatcacttgtgttattttcttcaagaaaatatttagtagaaaagataagttggttaattatattttaatcgcatgtggtgtatttacacttttcacatttttatctgcaatattttcaaaatataaacaagtatccttttggggaatgtttgatagagctgaaggatttataataattgcgtgttacatagtactttttttatactcactctatacttttaaaactactaataattataagtatattattactccacttttaattttagtatttattaatgcctttttaggccttttccaatatattggacaagatctaattaaaacttctttaggtgcttctattgcaggtgctagttccaattcaggtatagatttacttaatgaaaaaggaactatttatggtactttggctagttataattacatgggaagttttgtatcaattgctctacctattttattttgctatacaattttcgaagatgaagttatgtacaaaattctatcatttattggtactcttctttcattttggctcttatttggaagtactgcacgttcagggattattggtgtattaggtgctttaatatttggtattataatattctataaacctcttattaaacgttggaaaggtatcttgattggtgttattaccttaattatattgtttgttggcgcaaacttcgcatctaaaggaagtcttttcaaaagaatccctagcttagcatcggatgctttcagtatttttaaagatactagtgatttagattatacaaattatactcctgtaaaagacattaagtatatagactcaacgacagaagttgtactacctaatgatactttaaaaataacttatgaaagtggtaatcctgtatttaaagattcaaatggtgaagttgttccatatgctttaaatggcaaagtattatcaacaaatattgaaacttttaaaaatatcacatttgcttttggaaagcttgataagaagtcagttatcagtgactcacttctcttaaatataaacaatcaaccaactttcctattcaagttaaatgacaacaaaatatttcacttaatagatatgagcacaaagaattatattgatttacaaactcccgaaacctttggatttaaaggtaaagaaaaattaggatcttctagaggttacatttggtctagatctcttcctctcataaaaaatactatgatacttggaactggtcctgacacttttgtgtttgactttccacaaggtgatttaataggtaaatattatgcttatgatactccaaatatagttgtagataaagctcataatctttatttgcaaatagccataaattatggtgtaatcgccttagttggatttatagcaatgctgcttatttacattattgatagtataaagctttatgctctaaaaaacaactttgaagatagaaatcaagctttaggtgctattacttgcttgggtattatcgggtacttatttgctggaatatttaatgattcggttgtaggtgtggctccgatattctggataattttcggagttggtattgcaattaattttatgaatagagaaaacattcgtaagaaaagcaataaataataattgtgttcttaataaactaatattaaataaccaagagataatatagattatcccttggttatttttcattgtatttaattcttctaccatctaaatacaataagttttggaatgtttatattttttaatattccatactctctaatgtaatgaattctctaaaagaactttatttaaaattaaactcaagtaataaaattcttctgcaatatattccatccaaaactaaagtatataactaataaatattcaaatgtcaaataaattttatttgagaatagtacttaaatcaaagaaacatatgtctatccttattccctttaagataaattattagatacaaattacaaaagtatctgtaatcccctcacaaataatactttaaagagaatacattaaaatatattttaacaatagtaaacaactatttataaaaagcattaatacagatttttctcataaattagacgccctaactcctaaggcatatttaatgaaaataacatgcaaattcgtcgttcctctgatttataacgctatctatctacctaaagatggtaatttttaactcattacaatagtttctattataatcttatgcgactatattgaccgtagcttattcggtattaaaaatacttgtttatcaatatagcatcacatgaaaatacacagatattagcaacaaagaagcataaaaaaatctaataaaagcatttatagaaaatagattaacataaataattgcagttaaactttataattagaaaataagtactattattgataataaatctaagaatgagttgtatgacctgaaagcaaggttggaaatagccattgtagtatttattgataagaccgctagctttgttgctgcatatatgaatttcttaagaaaatagtcagtagtagtagctcttgatttaaaaccttatagacaaattaataacattaccccaaaactccaaaggagttattttaaactcatatagactattatatactaaatataagtaaattaaataatcaaacctctacataggaggatcaactctattttttcttatattcttcaaagcattcatatacataaaatcttttcctatctaatatataacaattgattttctactttctaatcttaattgagcacttagcccattagagtttcaaatgtaaattcattatataataatattattgataaaaaaagaacaaggctaagccttgtccttttttatttatctaataagttcagattaaaactatttaacccaagctccattagctcctacatagtatccatcaggagttgttgtgttagataacatagcacctgatccatttaagtagtagaaagttccgttatcatttaaccaaccagtttgcatagcacctgatccgtttaagtagtaccaagttgctccatcttgaatccaacctgtagccattgtaccatcagcttttaagtagtaccaagcaccaccgtcttgtaaccatccagtagctttagttccatcagctttaacataagtccatcctgctgaagtttgagcccaaccagctttaactacaggagttgttccttggtcatcacccttattatcatcgctctttcctccgattaatgaatatacatcatcatcttcgctccaagcaaccatgttgtctttatcgtaaactgataattcatcgaaagatccgtctactttgtaaactttatcccaatcatcagtgttatcgaatttgtagatatatccaccatctaatctccaaagatttccatcaacgtctgtttgaacagctgctgttgttttatcttgagcacttacttcgcaatcttcttcgctcttatcttcttcatcagcgtagtagtatccaccttttgtctttaatgtatatgcatcaacagttacttttttattgtcattaatatcagtattgtaagctataagctttccattagctacagtatacttagttgtagtaacagcagtaccatcagtttttacaaataaactttgttcatctaatttatttcctgaatcatcagataaagcataagtagttactgttttagcatatttagctccatcaacatcatcagaagcttgtgcttttgatatcttttggatagctgggaatgttacttcagtgtttgtaccaccaaatactgtattagcaccaatgtcagctatttttacgccattaatttctgttataacaccatgacctgttttaacagttacttctacaagtctgtagatattatccttatcttgtgttaaaactgcagtttgtttaacacttgcacttactttatcttttcctgaatcgctagaaccagctgcatcataagtatcgtttgtgttttctacagtaacttcttttgtagcaccgtcagcagttgttgtaacttttacttttcctaagttataatctgcatcaatgtaagcaccatttgtatcagtataaacattgaacttattatttgttgctgttaatccattaacatcacctatagcttttgcagaagcagtatatgttgtagcataccaaggcttgtcatactttgctcctccaattatagcaagatcatcttcatttttaacgccttctgcttcactttctaaatatctatcatctgtatcatctttaattttctttcttaaagctgctgcagcatcgtctgctgtatcacctttaacgtcatcatcagttacactacctttatctaaatcaacagtgtagtctccgtctgatacatctaagtatttttctccaaatagaactgcttcatctcctgaatcaacatcttctaatttgttgaattttccgtcagctacatagtaagcttcttcatcatcgttgatttctccatcaacaaagtatttaccatctttgtatgctactgcattgtatacagtaccatcttctgaatcaactttctttacgtctgcagcataagcaggcactaaagccataactgaagcagcagctactaataaagatgtaattttgtttgctcttttaaacataatttcttttcctcctaaattttaaaattcagataaattatagcattattgtacaactatgtaaagttatataataactactaatgtatatttttgtataaatttcttagtaatcaaataaatcacatgtaatttattacacatttacattaactataacatgataccacattacataatgcttgtacataaaatgctattaactttcataatttactgttcttcctagtatttactgtaatatcactaaataatacaatgtcaaaattcactttgggtactttttttaaaaaatatataaatatatttttttagttaatattagaaaataaatttattaaattctaagttaactaatatatacaattaaaattgtattattaagctttttatagttctatttttataattttgatctacttggatataattcattttaaatgaatatcttctataactatccaaataaactttcattatacaatacaactatttaaattcattttggtacctttttttgtataaatttaattttttcattattaattacataccgtttatccatataatgttcaatattgagaatttgaaatatcacaacagagaaattggatacatatttgtaaaataggcatttgaaaataagctgcttaggttcttaatgggaggttgttccattcaatgcttgtcacactgaaagtgggaacatgcagtaatgggcacaacctgccatttagaacctttcagcgaaattttcatagtcctatggaacaaatatgtatccaatttcggctaggattctcactacgcaacactatctactaattcaaaattttcttcctaattatctattgtaccaagctccatctgatcctaatttatattcaccaattgttgtgttatatgccatagacccatcattatttagataataatactttccattacttatatctttaatccatccaacctgcattgttccttgtgaatctaagtaataccaatttccatttactaattgccatcctgtttttctagctccatcatcgcctagatagtaccactttccattattattcagccaacctgtcgccatattcccatcggcttgtacaaaatagttttgcacccaagtattctttactgagttacctgttgaatctttgtattgccatttcccatcaacttgaacccattgacttgttttagtaacttctgcttgttcactgcttttggaattattatttgaattatctttacctctagtaatatttaaagtatatactctttcattatcatcatcatcttcaacttttatatctattacatttttccctttatttaatgatacatcatccttaaatttatcatctttatcaacttttactccatttatttttaccttataatcatcatatttaccgctatcgcaatcaggccttgcacgtattgtaattttacttaaatcttctggaacctgcacgtcataagtataaactttttttgagaagtctatattccctcccattaacgtaatactgcttaagtatacattatctgaatcttcatcgtcatcatcatttgatccggagtattttactctaatcttatattcatttacataagaattatcactatattttactgttcccggatctccgttatatactcttacagtaataatatttgttccagatgataagtcaacatcctctcctacgtcttttccttcagtatctgatgatgtttcttcaaatactcttatattatctgaatccaccccatctgcatctatatttatttcatctgctgaagtctttctggtatagtaagtttttccaggctgtacatcatcactgtctaccctatgcttatctgtacaatcactctcactataaagagacatattatctccgtttgaatcttctactgttaaattagttattttattagctgcataaactttagtagttagtagacccaaattagctactggtgcaattgtactaacagtatttacagctaatattatggctattatttttttcaaatttttgttcatatattctctctccttttaggcatatgaaataaaataccatggttatttttttattatgccttatataaaataatataaagaacgcctatttcataagcgttctttatttttaactcgattaaaattaaatttatttaatccaagccccatcagcgcctaatctatatacaccaattttagtgttataagccatagacccatcactatttaaataataatattttccgttcctatcttttacccatccagtctgcattcttccttctgaatctagataataccattttccacttgattgttgccatccaactttcttagctccatctgttccaaagtaataccatgttccattaagatttaaccaccctgtaaccatatttccatcagagtttaaataataattttgtatccaactattctttactacttttccttctgcatcattatactgccatattccatttgtttgcacccattgattagctttaacatctttacttcctgtatttgtatcagtattagttgaaccattgtttgtattacttgaagaaacatttcctctatttataattaaagtatatactctatctttattattatgttcaatttctacttttatgatattttgacccttttccaagttaacagttctcttataattatcatcataatcagcatcttcaccatcaatagtaacatcgtagttatcattttctggtgttgctttaattaccactgtatttacattactatctacattataagtatacttagttattgaattcgataaatttatagtacttccagctatgctaagtctctccaaataaatgtcatcaaaatctgttttatctgaatcatcttcgtctacatgtcttacttttacttcatatgtatttagcagatcatactcatcgtcatcatgttcattatttcttacagtctcaccatctagatctttcccatatacctttataatgagatcagtaacgactgatttatctgttaactgaatatcatctcctacttctttacctttagtagaatctgaactatctctaaatactctgacaaaattatcatctggcccgcttatatccacacttacagtttttgatgaagttttggcataatatgtttcatcttcatgaacgtcattttccttaactctattcttataatcattatcatcatatagttttacattattaccatcactatcatctaatgataaactatccaatgtactttcatcattagtagtcgaagcataagcccttgtagttaatagatttatcttcgaatttggtgttgccgctgaaattattcctatagctagtacaattgcaatcactctctttatatttttattcatagtctatccctccacttttattatgcattctcattctaatctggtgatttctatttttgtatccaagcaccatcataccctaatttatatccgcctactgttgtattatatgccatggcaccattgctatttaagtaataatactttccatttgaatctttaatccatcctgtttgtatcttaccttgtgaatctagataataccaagctccatccactaactgccagcccgtttttctagctccatcacttcccaaatagtaccagcttccgttataatttaaccatccagtggccatatttccgctgtcaagtaagtaataatttcctacccaagtattcttaacaaaatttcctgatgcatcattatacttccatattccatttacttgtacccattgattagctgcagatgatccattattattttgtgttgaagtcacacttcctctaattacagtcaaagtgtaaactctttcttcatcactattttcatttttaacatctaccttaattttattttcaccatcttttagattaactgttgccttgtaatcatcatcttcaaatacttcatcaccattaaccttaactgtataaaaatctttttctggttcagccttaattgttactttgtttacatcactagggacattagaactataatttacttgtgattgcgataatgagaaaagtctgccatcaatgcttagtttatctaggtaaatactatcttgatgctctgtctctgctgtatcttgcgagcttgtaccatttgatgaaggatttcctctatttattatcaaagtatatactctatctttatcaccatcttcaagttctatttcaaactcatttgtgccttcatctaaatctacttcttttttatagttatctgcactttgaacgtttttattatcaatagtaacatcataatcgtcatcttctggtgttgctttaattgttactctctttacatcactggcaacattataagtataagttaattcagattttgacaactgaaccttattattatttacgctgagcctttctaaataaatattatcattatcattattttgattataatttgggttctctactttaatcctatatgtacttaaaacattataatcatcattatctttgtatctcatatcatcatctggttctttgccatatacctttattgtaagagtagtagttgaagaatcatctgataaatcaacgtcctcccccatctcttttccttttgaagaagatgatgtcccattaaatactctaacatatttttcatcaggcccatcaatatcaatacttacagtatctgatgaagtttttgcgtaataagtttctccctcttctacatcgctagcatttactttgctgtcataatcgctatcactatatagttttatgttattcccatcttcatcatttaattctaagcgatccaaataatcatcatcgttatcagttgctgcataagcttttgtagtcaatacatttatatttgtagcaggcgctgctgctgaaacgattccaagagctaatgctattgaaactattttaatcatatttttcttcattttatttcccccgtttctacttatatatttaattagtaaatacatccttaattaattatatatcaggattaacaattaaagtaggctttttgagttttttagtaatattaccactaatataaaatattgtaaatatatttgcaactgctaaatatatttatttaaagcaaaagaaacgtctattaaataaacgttcttttgcttttttagttattataatatttatattcttagttaatccaagctccatctgatcctaacttatatttaccaatcattgtattataagccatagatccatcactatttaaatagtaatactttccactacctagatccctaacccatccagtttgcattgcaccttctgagtctaggtagtaccattttccacctgcttgttgccatcctgtttttcttgctccatcagaacctagatagtaccactttccactataatttaaccacccagtagccatattcccatcagcttgtacaaaataattttgaacccatgtatttttcactgtatttcctgttgcatctttatattgccagtttccgccaacttgtacccatttatttgtaacagttgctacaacatcagttgcactgcttggtgaacctgaagctgtatttgttgtacttcctgtagttgatgatgtgcctcctctatttatgattaatgtatatactctttcatcatcaccatcttcaagttcaattttgattttattttcacctttttttaaatctacatctgatttgtacttatcatcatcatctacactatcgccatctattgtaacgtcataatcttcatcttctggagttgctttaattgtcacttcatctgtatcactgcttacattataagtatattcaacttttgatttagataaacttatactttgaccatctacactaagtctatctaggtagatatcatcgtaatcatctgaactgtcacttgaatcctcatcatctgaatccgaagaatcagctgtacatttaacctttattgtatattcacttgaataatcgtcatcttcatatcttacatcatcatctggttcttcatcatatactcttacagtaagagtcgtagttgaatctttatctaaacttatatcactacttatttttttacctttagtagaatcagaagtccccttaaaaactctaacatattttgaacttggtccgtctatatctatgcttatagtatctgctgaagtcttagcaaaatatttctcgccagcctctacctgatctgcatcaactttatcatcactatcataactgctactttcataaagctttattttgcttccgctttcagtaagcaattgtaagctttcaagttcagtctcatcattatcagatgatgcataagcttttgtagttaaaaaatttatgtttgttgcaggtgctactgccgagatagttcctattgctaatgcaattgcaactatttttttcaaatttttattcataatgttctccctccattttaagcacgcgaaataaataataggtatgcatacttgtctattatttttcgattgtgctttaattacatattatgattattttaccacttaattcattattgtgcacttgacacacacaagtttacaatttatttacagaagtattattattctaattctccatccgtgcctaatttatatgcacctattgcagaatcttttatcattttacctgtagaatctaagtaataccatttcccgtttgaatcttcaatccatcccgtctccatagctccactaccatcaaggtagtaccagtttccagttgaatcttctaaccatcccatttgcatggctccacttttatttagataataccaatttttatttgtatttacccatccggtctgcatttcaccgttctcgttgaaataataccagttgttattatcactaaaccatcctgtagttctaaatccatcttgtcctaaataataattctttccggtatccttatcaaaccaccacttattttttaaaactgagcctgtaccatctacatatctccattttccatctactctttgccatgcattaaggctgccttcttgagtttgaattgcaaagttttggccgtttgaagaatcagttttatttgctgatttacccctatatacattcaaagtataagttgtatcttcatcctcatgctcaacatatattgttatagtattatttcctttatctaaattaactgtcttttcgaaattgtcatcttcatatactgagtttccgttaatttctatataatcatcatcatcgtcagggttagctctaacagttaatttgtcaacatcttcaccaacattcacatcataagaagttttatttttggaaaaatcaacacttccatcacttaagtaaattccatctaaataagcatattctctatcttcttctgcttctgatgtactactttcttttcttgcatgaataatataagtcttttcacaatcacttacatctccgtcattataagcttccttatatgcttcttcactcttatatgttcttagatagatatctttatatcctgaaccgatattaacatcttgtccaacatcttcacctttttctgatctgcttgatgaagtgaacatcttaactacatatccgcttccttttacttctgcagctacattaaagtcactcacacctttaagctgcacataatagtcagtatcgcttgacaaatctacttcatctccagaataactatcaagcaatttaattttacttccgctaccccaagtcaaatctaacgattttaattctccattactagcatcattatatgttgatgcataagcttcaacgcttcctaatagaaaattgttacttggtgcaaatcctgaaacagctgcaacaacaagagttgctgcaattatatatttaatttttttatgcataaacttcctccttattgttatttataaaattaatctatttacttttacataacttacttattatataaataaacattatatagttataataacataacttaatttaattataaatatagaactataatcctatactattccaagtatactacatagttctaaaaattctattatataaatattaattttttataaataattaacttatatatgttacaattcacaatgcacatttcaaaatttctaataaaattcttgcaacattttcagacttatgatgaagaattatttttgcaatatatatgttagtaattgaaaacttaattttatctttgggttagataatcagttaattcataaaacaagaactcacttataagaataaagcgagttcttgtttcattattagtaacttaatctaaaaactaaattaaatgtacaattaaattaatgttcatactattttcctaaagtattaaagctccactattattgaatttatactcttttccattaatagttcttgttccagttgccatgctaccatcttcagttaaatagtattttgaattatagtcaattaaccatcctttttgcattgttccatctgcattaaagaagtaccactttccaccatctgatagccagcctgtcctcattgatccatcttgatttaaataataccaattatcaacttttttagtatcattatctcctgagttagttgatgtatcagtgttcttattttgatcatctactgtttctttatgccagcctgtaagcattgctccgtctgatcctaataaataccacttttcattatctttttgccaacctgtaagcattgctcccttactatctagcaagtaccatttttcattatctttatgccagcctgtaactcttaggccatctttatctaagtaacagtatactttttgatctttatcataaagccacgaactttttaatacttttccattttcatcataatacttccagccatcattagtttgaacccattgagatttcttatctgatgtatcctcagtattattgtccttgctgtcgtctgtttccttacctctatttatagtcaaagtataagttctctttttatcatttaactcatcttcaacatttacctttatgacattttcccctttatctaatgatacttttttttcataatcatcacttgatcttacttcatctccatcaattgtaactgaataatcgctatcttctggctctgcacctatagttattttacttacagactcatctaaatcaacgttgtatgaattatcatctttagaaaagtcaatatcgccttcacttaaagttatattatctaagtatatatcatcttcgttatctgaatcgtctcctctagtaacatttaatgtatatgttctttggttatccttactatctgtaacttttattttaatctcatttttacctttatttaaagatacagtttctttataattatcgctagaatctactaacgatccatctactctgactctgtcgctattactctcaggaattgctttaatccacatactatcaacattttcatcaacttttatatcatagcttgttttcccttttaagaaatctatatttcctttgcttaaatcaatcttatctaaatatatcgaatcttgagaatcatcctcataagaactttctttagtctttcttacatttagcgtatattcttctttacaatttgatacattattctttactttattaaattctgatttagacttataagttcttatatataaagttgtatcaccttttccaagtaagatttcatctcctggatcataagctgtagcattttctgcatcagatgtaaaaatcttaactacataatcatcatcctcagcttcagccgttattttgattccatcactatcatcggtaagctttgtataatattctgtttcatcacttaattttactgtatctccattatatccatcacgtaaatcaagagtttctccatctaaagattttatctttaatgtctttaattgttcatcgtctggagaatatgaagacgcataaacaggttttgctcctacaaagtatgtatttaatgtcgtaggtgaaattgttgaaattgtattgacagcaactgtgatcgcaattattctttttatatttttattcataaaattcctcctcatccattataaagtgaattttttaaaaataacaaaaaaaaatcacttaacataattctaccatgttttttatataaaatctaaatatttctagcattaatacgactcttttttcagataataagatataactaagttttatttactttagttatctcaaaattttagacattatgtactataaataaattccaaaaattaatatgtgaggagtgattacaatgagcaaagaaagaacaccatataatcctactccaggagattatgatgttgagaagttatctggtacaaggcctgaatcttctaataggcaaggaggacgagataacattgcaccaactagaagtttaaatcccctttcgactgacggccctaataaaaatataacgagttcaacatcctctaaaccgcatccagtaacaggatctgtttctatgaatcatgaagatgcttttgaatataaaaatcataatatttgagaagttaggagtgattattaatgagtaaagaaaaaatgtcatctaatgaaaatgaaaaatattattctgaagaagaattaactgattcacatccatcagacccaaatgattctgaactaaaaaaaataaaaagtatgtatcttccagattcgaaagctgaccatgctccaagtgaaaaaagcattgaagatgctaatggattggagcaccctgaaccagtcaaaccaaaatcactaatataaatagcatggatataactttatctacaacaaatcaaaatttatttcaaatctatatttatattgtaaataatattaagcaaaagataggagtgatttttatgagtcaatcaaaaattccatttagtataaaccctggcgatgattatccaatggaagagtatagtaaagaaagttcaccaaaatcaaaggcttctgattctgaaaatgtaggaaagactactgcttcaggtgaaagaaatgctaaaagcttaaataatgcaaatatatctagaactaatctagacacagagcttattgatctaaatgctgacggcgactctgatgagtctaaatatagtgatttaatataaataaattaagatgagataatttagtgagattaggagtgattttatatgagtaaaggtaaatatccatatgttccaactccagaagatgttcctgctccagacctaagctatattttttcaccagaatcaaaaaattctagtaataaaaatgataacaaaaatactgattcacataaaagaaattcttaagcttaagaaatatattacaacactaacccaaatgtaaaatttatttatcaaatgttcttagctatgatagttattaaaactataaatctttagcatagtttatatatttcaacgataaatttacatttgagattttactaagcgagcgtttaaaacctactaaagcctaagaaatccaattacaatctatatatgatcccaaaataacataatttattattagtaaaattattggggataagatttgatagtttaagatgaacttcgatgaattggatcttttagaaaatatataataaaaataattaagttaggagtgattttatatgagtaaagaaaagaaagtatctcatacttccgatgtgagagatggtagtaaaaaagactttactaattcctacttgccaaaaatgagaactaattatcatccaagcaaagatgatgttgaaagtgcaactggtgtagattttcctataaatatgcctaatccagcagttgaccctattgttgtaaataatatagctaatcaagaatttgattacacacaagatatgctttctcccgataattatgaaatagatggagatgaataattttataaatacttataaaaaatccagtaataagtattataaaaaatttattatgtttttgaataaatttcccgctgttggtaagaataatattcgtaccccataatactcaggcactaaagtttatcattttaatttagtgcttatttccaaaaagtccaccataaattaaatttttatggtggacttttatattattttaaattgtcaaaaaacccttacctctaacttcagatatatcaataattgttataaaagctcctggatctatctgatgcacaatgctctttagttcaaccatttggtgtgagcttacaatacagtaaagcattttctttttatcatgagtatactcaccttcagcaaacaaagatgtaactccacggttaagatcttttattacataatcaataatttctttttcttttcttgttagaataagaagaagttttttactgctaaatccttttaatactctgtcaagaactgtactttgaatgaacaaagaaataagagtatacaatgcttgtggaataccaaatattaatgctcctataataactattatcaagtttagagaaaatcccaaacttcctatattaaaattcgaatatttttttctaataagcatggttataatatctgttcctcctgtggaaccatgtcttaaaaataccattccatagccaataccacataaaaccccaccatatatacaaaagataagtaaatcaccattcatatcaattaggcgtgaaagtggttttgttataagcagagaagctgaaagactaagcatccctattgttgtataaatcgtaaatgatctatcgagttttttataactcaatacaagtagtggtagattaattattaagattactactccagatggaactttaagagtgtactctaaaatcagtgcaataccagtggcaccaccacttaaaagttttgcatgtactaaaaatagatttacccctaacgatgcaatcatgcagcctaaaaatatgaaaaacacatcaactatattatgcttcaacttataatataaactcatttgtatactccttgcaaaatggttatttgggtttcatttcatttttcagatattattctatattcaatctttagtattttcaacagattttttacagtttctacaaaaagtttttactatttatcaagtaattattaataatttatgtgatatagcaaataaatatcaatattactaccagaatagtaacatgatatctatttacattgagaatttattaaattttaaacttatcaacttccatttctaaacgctcagctttttctttcagtttttccacttcctgtgatacttctaaaatagcttccgtttgagtttgaattgatgccgttacttcctgtgaacatgctgctgtttcttctgatattgccgcaatattatttattgaattaactacttgttcatttttgtcattcatttcttcaacaaagcttcccatataatctattgcagttgttattgtgtcagtcgcctgtgtaatattattaaaggcttcattcacttcatttactgaaacgaattgatccatagatacttcttttacttttttcatatcacttacactgcttaatatatcttgctttatatttaaaattatctctgctatatttttagttgatactgctgaattttgtgataatttttgaatctctgttgcaactactgcaaaacctttgccagcttcccctgctcttgccgcttctatagatgcatttagtgcaagtaactgagtctgctctgcaatcccctttaaaactccaagtatattttctatattcttagatttatcacttaagctttctatatttccttgagttttttctacaatggaaattgttgtttgtgccttttcttttaaatcttgaaccttgttaattccatttgcaattgctttagatgaattgattgattcattaatcattagattagtcttttcctctaactgattaaattctcccctcatgtcctctccaagccttgcactctcttctgctccgctagcttgattagatgctccttgggctatttcctgtgatgtaatatttatatctcttgccacattagttgtttcctgagacttttcagccaaaattgcagaactctctttcatatcatgagtcaaatcttttgtttcgattaataaagcagaaaccttgctcatcatctcattgaagctttcacctaataatttaatttcatttttcgctctagtagaagattttactgtaaaatcaccagttgatgctatagataataagtttgatatttctattataggcattgaaattcttttcgacacatacatgattactgcagctgctgcaagtaatattattaagcctgcgattaatgagatttctgttatgttatttataatagcctttgcactagattccttttgaactgttataactgaccaattaaatgaattcccatctaattttatgttcgtataagatgcatagtaattttgaccattttctttatatttaatgctaccatcatttccagccattaactgagctatgatttcttttagtccatctgatacttctatcggctcttccttaggatttccctctttaactccagttgttctagtttggtttttataattatataattcttcaatcacttcggtattaggatgtgcaacaacaacaccctctccatctattatgaaagaatatcttcctgatgcttcatctgaatattcacttactacttcctgcaatttttctaaattaatatcagaccccattactccaacaaacttattatcttcaaccaaaggaacaaatattgaagttactggattcttagaagaaactgaataatatgactttgatacgaatgatgataaagaactttttgcttgcgcaaaccaccatctgtctgatctgtcagcaagatcccctgatgatctcccagtctgcattcctttttcatcctgtatatataataattcaaaatatggatttctgtctttagtttctttaagtactttttcctttgtatctttacttccttctcttacttctgaattatatgccagatcttctgtcactttatatgccgtatccataaaagaagaaacattttttgatataagcttagataacatttcattcttactatttatttcattatcataatatttcgataaaatagtgcttacacataaaataattccaagagtcagtacaacggatattgataacattgtgattaggagttcgctttttatgctctttattttcacagagctatttttatctttattatttgtttgcttgtccattgtcttttcatattgttttctaatcaatcccatttattttctccccttatcaatatttcttataaaataagtagtagttttagaattattttttacactataaaaattatgtttattacaataaatatacttattcttttacaagttatgcttatttttcatgcattattgataaattataacatattactagctattatcaacatttataatgttttttatataataaactacatatttaataaaattctaaagaaaagttagtcttagacttaattttatgaatagatttactgcggatacgtaataacaatttcatggtaacactttgaatttttcatacagcttaagtcatttaaataatttcgctttataactcaaaatctatatacttctcttaaaaccaaaaagccgtataagataattataaaatcatcttatacagcttaaattaatttactctaagttcctaacaatattatatatgcgacttttaaattaaatttatatgatcatcaactgaaaacttagctttaatgaaaaattaaaatttcaggtttaaatttagttgttaaatttagatatctatagataacacaatcataaactatacttagactatgaaatatactccaaccagaaatgagtgatatacttttgtggaatgtttcattggtaatttttatggaagcgattctttggctataagttgttccaaatgtgctagttcaaagcttgttctttgaggctagcactttgggtgcaactttatggccttggaatcacccatcacaattacctagaaactggaacaaaagtatattattcatttcggtgaggcatacgcataagtatagattatattcgttttatctatatactcattttaagtatacaaaaacttctaacttaccgctgtttcttggaattaagttatctttcattacttctccatttacaactacctttgtaacaacttgattatcactattttctgagctataaggtatggatgttacatcactttgataattattattttgctcattattcttagtatttacgtttaatccattttcattatttgctctagagacttttatagtgtaatcttctttttcatttgtaatctttatttcaaattcgttccaagcttttggtatacatggatttatagcatatcccttgtcttgaacctttctaagtcccaagatattttcaacgccaactctgtacatccatcctgaagctcctgtataccaactccagccacctcttcctgcgtgaggctcttttatatatacgtccgctgccattacataaggttctactttatatgtcatacactctaactctgtttttgcatgatttataggatttatcatattgaaatagcttaccgctttatcaccaagcccaagtttagttaaagcaagtatcacccaaactgcagcatgagtatattgacctccattttctcttacaccgggcacatatccttttatataacctggttctaacttagaattactaaatggtggtgcaagcaataggatcattcccttatctttctttacaaggttattatccaccgcttccattgcttcgatactacgttccttctgtcctgcacctgatataattgcccagctttgagctaacgagtcaattctgcattctggattttctcttgaaccaagaggtgtaccatcatcaaagtatgctcttctataccagccgccatcccaagcgtttttctctaggttatctcgtataaactctcttctttcttcaaaatgttcttttgtttgcttatcgttttgtttatctgcaatttcaataaaactttctaatattgaatataggaaccagccaagccatacgctttctccttttccttcgtttccaacagtactcattccatcattccagtctccactacccattaaaggaatattatgaataccaaacttcaagctcttttctatagcttttaaacaatgttcatatatagttccttcttttgatgattgatttactattgtatatctttcatcttcaccttctcttaaaggttcatcttctaagtacggagcactagcatttaaaatttcgtaatctcctgtagaattaatatattcggccgttacataaggaagccataataaatcatcgctaaatctagttcttattcccgaattaacaacaggatgccaccaatgttgaacatcaccttctacatactgtcttgaagcacttcttagtatctgtgcctttgttatttctggatttacaaacccaagtgacatagaatcttgaagctgatctctgaatccataagcaccaccactttgataaaatgcacttctgcttaaatatctacaacttaaagtttgatataaaagccatccattcaaaagataatctaatgacttatctggtgtcttaacttgtatattccctaggaaattgctccaatattgttttactttatctaattcattttctgcatttccaaaaatcttatatttacttattaattcatctattttttctttttcatcttgaccaaataggattagcagttcctttttctcaccttttcttaacataatacttgtttgtgccgctaaacaagggtcatagatgccaccagacttattgcttaatctattatgttttagagcctcaggactaaaggtttctcctccaatacctaaaaactctttattatctccagtgaaactcaattctttcccacctataatggttaagtaagcatttaattttccaaagtattcactgtatggattatgagcacctataaatttatttctaaatgcaaaatcttcattactatttttaatgctgcttctatttactacgtccattgtttctttgtagtttgattcatctccacctatatatgttgagatatatcttgaactatcatactcataaacacccaaaacaagttttgcatagtagaatagcgaaacacttctatcctcattacttaagttttctagcgtaaccctctgaatttttaatctttcatttttaggagcaaaaatttctaattttccttttatattatatgctgtatgtctgtattcagagtatccaaagctatgttttattaagtaatcacctgaatctcttacaggttttggtgttattgaaaaatacttaccagagtcattatctttaatatataatgcttctcctataggatctctaatataatcattactccaaggtgttattttattttctctagaatttccacaccaagtatatcctgatcctacttctgatatatggaatccgaagtcatcatttgaaataacattaatccaaggtgctggtgtatttctgtaattagatagttttattatataactattatcgttcttacaaaatccaccataaccattaaagaaatctaaatcacttacatcaggatcatcatccgcatctttaccataattattagaatcttttgatacctccaaatctacatcaactaaacttgaaatttctgagttataaactaactctctttccttcttactttgattagatttcttatctatttctaaatcttcaatatcatcttgatcttctggctcattaatattctttattaaatcatgaatattaattacctcttcatcattatcatatacttcataaggtatgttttcaccatctgtatcttggttagtattttcatccttatatttatccttaaaccttgaattatttcttaaagctatacgcgaatctaatccctcatcatctaagtccacatatctattaaaattcttttcattatatgcatatgaacttaatggattattcttatctacatatactctagaaattcctattagtaaatccttaatttcagcgtccatggttgccttattgtgaataaatattccacccgctttattaaggtaattacctacattggatgaccttattacttccattatatttttttgaagtggttcatcataagaaacttcttcattattatatataattaaatctaacttaacccccttaattcttaagtaattgtggaattttaccatggtatatactaaatttatgtcttcttcattttctatagctaacattataataggtaaatctcctgagattccatatgcccataaatccttttgatgtcttgaaatattcctaatatattcttctctattttttctagtattagttagaaagaaaattgagcttgcagagctttggaatatattagctatggcacttcttattcctaaagtctttagttcaagttgtgcacttatgctataatttttgaatactctctctagcttactgttgtcattgttatttctgcatatttcaagtatttgctcttttgattcacatattccagttatataataaatctccttcttagagttaggctctaatctaattcttgttcttatactcattataggatctaaaactgttcccacagtattatctaaagctttatcattatccatagcttttggattcttcaattctctatttcttcctataaaatttattcttgaagtttcatatgaaatgcttccttctaagtctccattaacaaccgctttatggaaaatatatggaacctttgcattcttaactctacctcttctgcttcctataagaacactttccttttcatcatattctgtttgaacaaataaattagagaatgttgggtgaactacgtcagcactgaatgtagctaaagtcacttccatgtaacttgttatttcaatacttcttccattatctcctttgttatttaaagttaatttcctaacttcaaagttttcttctgatgatattgaaacttccattgaagtttcaatgttaccatcttttctactaaacttcgctttatctagattaaactcaactgaatacttatctccaagatctttacaaggttcaaaggttgagctccaatattcatttgaatttaagttctttatatagaagaacattccactatcatcacttgtagagtttcccttccatctataaagcatagtatcattcttttttgaatatccatttccgtttactgttaacatagatgaatattcaccattgcttaatagtaatacttgtggactatcctgattcactttttcaaatactcttggaattaaaacctctccctcaaaatatctattcttaacagaaaaatcttcatttctttcaaagacaacattttgtggaattttctcttttagtaaaagttctgtagattttatctcaggaagatcatgaaatctatttatcaaaatatcattacatagaatattatccaaagccataagtgacattcctaaatgatgtaccatataagttgcaactttattgaccttctgtggataacttgagttatcataattacgctcatcgtcattattcatgtgaatcctactgatttcatcattcttatccacattattcacattatcaacatgcttattattcatataacttgtatttttatcctgtgtattatccactattttttcgtagttatccacataatcctcatacttatccacattttgtgtataattttttccatttgttgaaatattctgctcaagaagatcacttttagaaagtgtcattatgtacttatctttcctagctttagtataatctaaagcttctatgaaaccatatcttcctaatgcgcctaacttttcaagttctttaagatttttaattccagaatctttatcaaaagaaatagccattaatgttgaatatggagatattacaagatcatcttcaagtcctcttttaagaccaagtccaggcactccaaatgccttatattgataattttctgccgcatcaaattcataaaatgcagattctgatatcccccaaggagacttcttttgttttgcaaagcttttttgcgcctttatgacagacttataagtttgactaagtaaggtcttaggataattcctcattattaatgatggcataaaatactcaaacatagttccactccaagatactagtgaatgagtatggaatgcgttagtcatggaacgtcctagcttaaaccaatgggaagaaggcacatcatttttagctatcgcaacaaaagatgctattcttgactcagatgcaagcaaatcataataggaatttccaagagaattttcctctacattatatccgatagagaatagtcctctagttttatcataaagaaaagtaaaatccatttcttctgttattttatcaatatcttgtattatattatctattttatctatgtaatttttgaaattatttatcttttctctaaatttgcctctgaaattatccccattttttcttctataattctcgcatctgtggattaattcaacaatatctgggactccttcgaaaaattccttactatataacttttctataccttcaaaaatgaaattataatagctaatcttttttctaacctcacctataagcttatcaatccaatatcttgtttcttcactctcaagttttaattcgcctatactgttttcctcttcatcacttaagttattttcattattcatattattattttccgacttaagtttctgctttagactgattatctgctctgtttcctttaaatcttgaagtttaaaggaaatttcatttaatacatttatatattctccaatattaatatgtgaagaaaatttaagctttaaattaggggcttcatcttcaattattttgtaaatatcattcaaagatgtaacttcttttactcttataactttattatgtttaagctcttccatagacctctttagtacccataagttacctagaagattcccactatcaactgttgatacatatctaggccataaaggttcttttgtttttgtatcataccaatttagataatgaccattaaccttttgaagagttttcatgctatttaatatgagttctattctatcaacaaactctgccatggttatataccctaagtcatatgcagcaatgcttgaagtaatccccatacctatattagttggagatgttctatgagcaactcccttaaatggcttctcctgatagttatctggagctagataattattttcttcattaacaaaatcctcataataagcatatattcttctagaaatttttcttaagtaagttttttcttcattctttaaagtattcttcttgtgttctggacgtttaatacttatggtataagccatataagggctaactatccataatgccgcaactactacactataagtaactactcctaacgaactataaaatgataagtatagtacaagcagacccattataggagcaatccacattctctttaaataattaataaaattattccttgagtttttttctacaagttctgctgactgccattctaaaagatttttcttagaaaacattactctatatagtgttactattatggcatcaagcatcaaaaaagcttgataaggaataaagcttactattagcactatctgctctagcgttttaaatgctcccattaatttatttttaggtgttacaacaaaatctgttaccacaaatactaatggagttattaaagctaaaaaggcaagaagtgcaacttgacttcttccaaataaaacagtgagagataatataagggcgagaagtaaattaggtgctaataaacttcttcttagattatcaaatatcttccacttatataataaatttattttattagaaaataaccatcctattagctgccagtcacctctaacccatctatgcaatcttttgcagctagattcataaaatgctggatatccatcaataaattccacatcacttaataatccacatcttgcaataccaccctcaagcaaatcatgacttaagactgtatcatcttttatagaatcacttaacactttataaaattcatctatacatattattcctttaccagtaaaggacccttctccaaataaatcttgataagtgtcagaataagcaacggaatatccatcaactccttcttctcctccaaatacttttgaaaaataagtttgattcttagcttctaggctaatgctcaccttaggctgcattattccatatcctcttgcgactctattgccttttatatgaggaatattaagaatatggctcatagcccctacaagtttaaaagcactttccctaggcatgaaagtatcttcatctaatgtaattagatacttaacttgtttcagttcttgaatatccgagctaaaaacattataagtatgattcttaccatctctaataagagccataaattccattaactttccacgttttctttctctgcccatgaatacattttctttcttattataaattctctttctactaaagaaaaagaatctattttcactaactccttgatcatttttaaagtcatcggaatatttctcatttaaatctctagcatattgaactcctgatttaattatctcaacatcttccggagaagtctcatgctcagaatcatgaaaatcacttagcaaagcaaaataaatattcttatctttatttccgcaatatgctacttctaattttttcataagttctttaactttctctttagaatttactatagccggtattacaactacagttttattttctttaggaattcctgaactaaaatttaattttggaattaatctaatatcaacaactttgcccacagtataattcgtaagtccaattattatttcattaactggaattaatattataaggaacgaaattacgtattgtactaaggtatatctaactcctaataaactgcttattaataaaataagaaaacttattaagagtgttccaaaaatattgcatgctacatacgtatttgcagatatagttgtttttatattatttccatatttctttaattcgtttattccctcatcaattaggtaatatccaatatggcatttataattttcttctttattagttttactatttcttgcaagctctaaaatattgctagctaaagtaatttcgtctgcgtttgatattctagccatcttttcgagcttatgcctataataatccttagattcaaaatccatgctatcataaatattcgcaggatcatttttaagtattttttcaacaaaagaagtttcttcaaagaatcttctccagcttattccctcaatctttctaataaatgttatgtattctccaatatttctttctaaaacttcttctcttaaatcacttctaatattatttttatctaaatccgaatttactttccatttagactctacaagatcatttattcttggatcttctatagaattatctcttaatacactaaaaaattctcttaaaaataaaggtccaatattcttcccaacattaatatttcctattttttcttcgaacttattgttattaattgcatctattatcttttcagctatatctcttcctcttatgatttctttttgaatatcaacaagttcgttagtatacttagataaatttattattatagctattttaagcattaatgggaatgcccacaattctcctgtagtgaaaattttctctttattattaaaatttccgctttcaatatcgccttgaagtccgtttatatatgatataagtttatcacaatcaatctcattcccgttatttatatagtcctttgccactacaaaaatgcgtggaataagttccctattttcattatcttcatctgtattgttatctttatttctgttgtaattaacattacctatagaagatagtcccttaaaataatctataggcatctcaatctttatcgctttgtactctttttctattaagtatatattatcaagaagccattcagatgccccaagcactttatatccgttcttagataatttgctaaagtacctaaaattttcatggatgcaagaaaatccatcagctaactcttttaaaacattctttcttactccataagaattatttctcctcaagtaaaaaactcccttcttactattggtatattcaaaaaaaataataggttaatatgatagtctatttatctttatactttataaacataacttcccaaaagtacctcgctataaggaaatcatatttttttatctaaagataaatacaacattttgcattatcgattattattttctttcatatacctaacattaataacaattacccaacggagatatttttaccaaaattataaaaagtattcttatattcataatctataaaaaaatagccatctaaagttatcatgtagacaaccttaaaatggctatttattgacgttcattagatattagctgatgctttaaaattaacaagttattaaaaagtcttcactttaatagatgcttagacatttcccattgttaattactattacaatctattaattaaaaaactcagtaaatgctttaattgtatattcattatcctttacagtagctaattctcttattgaatgcatacttagtagtggtgcacccatatctattactggtatatttaattttgatgcagtaataggtccaatggttgttccccctcttaaatccgatctatttacaaatacttggcatggaacttcggctttttcacagattcctttgaagacagcacttgcataactatcagttgaataacttccacctgctgcaattttaagtacaggcccttttccaagcataggcttatttgtaggatcacatttttcaacatagtttggatgtattgcatgagctaagtctgctgaaatcattattgagttgcttaatgctctcttgaaactttctctatctttttcaagacccaaagttattctctctaaaatattttctaaaattgatgaatttgcaccttgggatgttaagcttcctatttcctcattatctaaagctactaataccttcgttgctttaatttcattactgcttattaaagcttttaatcctgcaaataccatccataaatcatctagtcttccgcatgatataaattcatcatttaagccaattagcataccttctgcatactcatataaaaacaaatcgaaatctaatatatcgctagaatctacctttaaagtttctgctattaaattaattaaataattatccttttctagcttatcttcaactattgtaagcattggtaaagtatctttttgcttattatattcatagccctcattcacgcttctattcatatgtattgctaagttaggaataattaagattggcttatttacatccaataattcaactcttggactgaatggattttctccttttaaagttactcttcctgctacgcttaaaggtctatcaaaccaagtacttagtattggccctccatatacttcagtatttaatttcacataatgtccttcaactttcatttctggatttggctttattctaaatcctggtgaatcagtatgtgctcctattaatctgaacccatctttttcaatatcaccattccctatttcaaaggcaattaatgcagagttattttttataatatagtgtttactacctttttttaattcccatttatcttcttctttaatttctgtataaccttgcttatctaaaatatttttaatttcataagtactttgaaaagccgtcttaccattatttataaaatctaataattcttgtgcattattcatatagttattatctctccctacataaattaaatttttctcataaaacattaaacaatattaaattcacttttaatattatatacctttttagaaaataatgcatattttatatgtgtgattatctagaaaattttatattagataatacctacatagtaaatgccataactactttttcatcttttccaagcgtcacatctcctgaacaaagttcaactatttcttcatcatcgtcacttaaatttatctcgttaatgtcgcttttattattggatttttttctgcccttactattcttctttttcgcagagattggtatacttgactttgcattagttacattactttcgcaggaacctttttcagtttctaagctgatattcatattagcattgttatttatgcaagtaatattactatttatcacatctgcatttctagtattatctacacattctatgttttcattattatctttatcattagtaggatctatactagcatttatagtatcattattctgagttattccagcacttatagtattactattatttttattactatttgcaaagctttcattttctgtattacctttaaccacaaattcagaatccacgctggtagaatctttattatatctattacaattgttaatattattatcatcattattgttttcatttatctcttcctttgtaatcatagtactcttatcttcgattttagcagttttatttctaacaatttcatcaatacttttatatccactactttttgaattaacacccattagattttctctatctttaattttaggctcatccattttgtgactagaatcattttcttttactacattatctttaatttcagtactcttatttattttaatattttgatgcttagcaaaattctttactttatagattttatcttcagtaaactcaatcatttctaaatccattaaaaccttcatagctaatttcactcgttcaatatctctattaaattctatagcgatggtttccattgtgtatggaatatttctagacaaaaataattctccttctaaatttaccttaccagctaaaacaataagtctaatccaaatatactgaataagatctctttcattcattgtatctattattttagatttagtatcatcatacatatcaactcttaatttaacaaattttctttctttcatctttaacactctcccatttaaattagtcttctatatggaatatatgtataaaaatgaacaattacataatttctctaaaattttttatatttttttagaaataattttattccatgggtaaaatacatctaaattttaatttggatctaattcatatagataacccaactaagaccttaacttatgtatataactcgccgaaatgaataatatacttttgttccagtttctaggtaattctgatgggtgattctaaggctataaagttgcacccaaagttctagcctcaaagaacaagctttgaactagcacatttggaacaacttatagccaaagaatcaaatccatcaaaattaccaatgaaacattccacaaaagtatattccccatttctatttgggatatatttcatagtataaatccagcttataattggcttatctataaaatagtttgatgcagtaaaatggtagacaaaaaaattcttacgcatctgcctcgtaaaatatatatttctgacatttccaataattatctataaatttaactttttataatttctttgtaaagaacgaaaataaacgcccgaatttataatatccaagcgttcattaatatattgcttatttatatgaattattttataaatctaaattaaatattatttatctatacttaaaatacacactaaaacttatataagattatttttagcaagttcttcacgtaatttttctagattcttgccttccattgggaataatggcattctaagtggtcctacgttatatcccataattcctaatgcagtctttactggaattgggtttacttctataaataacgtatttataagatctaaatattttgtttgaaggttacagctttcttctacttttccttcaaaatataaactacaaatttcatgcgactcttttggcataatattcgaaaagactgaaataacgccttttcccccaagtgataatatcggaactatttgatcatcatttccagaatatatattaagttcatctttgcatatcgcttttatctttgcaatcgctgaaagatccccactagcttcttttgttgcaactatacgtggatgcttagctaattctgcatatgtttcaggtgctatattaactcctgttcttgatggtacattatatagaattattgggatattaactctatccgcaatataattgtaatgttttattaaaccagtttgagtagttttattgtaatatggtgttactaataaaagtgcatctgcaccaacgctttcagcgtattttgataattcaacagcataaactgtatcattagaccctgtgcccgcaataactggtactcttttatttacatattctactgtaaatctaataacttccctgtgttcttcatcagtcatagttgaagactcacctgtagttcctgcaattacaattgcatctgtaccattctctatattaaaatcaattagtttttttaattcagagaaattaattccatcttctgtaaaaggtgtaacaattgcaactgctgcaccagtaaatataatatccttcataaaaattgccccctcgaatattttctatataaattataacacagtaaagtgctactataaacttagaatatatttaaaatatgaaatatatatttattagtgttagattgcttaacttctggtaaaaaaatacttgcttaactaaaaatatttaatataatagatgtaatgcttattggtaatttcttatgattggagtgtatttcatgttttttgaacttatagttaataaatttgttaaggataattctaatgttaaagatgacacagttagaaattcttacggtgttcttggcggtatcataggtattgtagtaaatattattttatttataataaaactttctgttggagtaatagtttcgagtatagctataatggctgatgcttttaataacctttctgatgcagcctcctctttaattactattttaggttttaaactttcaaataaaccagctgatagagaacatccctttggtcatgggcggatagaatatctttcagcacttattgttgccttcatggtaatgttagttggtctgcaatttataaaatcttcatttgaaagaatagttaatccatcaccagttgctttcgagttagtttcatttattctgcttataatatcaatattttttaagatttggctttctaaatttaataaatttattggtgaaaagattaattcctctgctctaaaagctgcttctacagatgctctaggggatgtatttaccactacttgtgtggctatttcatttttagcttcaaaattcacttctttccctatagacggatatataggaatgtttgttgcattattcattgtttatgccggtttcaatttagttaaagatactataaatccacttttaggagaagcgccagatccagaacttgttgaatccatagaaagaatggttttgtcttatgataacatcctcggctcacatgatttaatagttcacaattatggtccgggtaaatgtatggcatctattcatgctgaaattcctggaaatattaacgttgtagatattcacgaagtgattgataaagctgaaagagaaatttcaaaagcacttaagatttacttagttattcacatcgatcctatctgcattattgaaggcgaagtcaaagaagcttatgatgaaattctatccataattgaaaaatatgattatatagagtcaatacatgattttagagtagtcggtgaaggtgatatcaagaacttaatttttgacgttgttattgaaccatcaaaaaaactttctataactgatactgaacttataaatataatatctgaaggagtaaagaaatatcatccttcttataactgtgtcattactatagacaaacactacacataaaaatacagccgttatttcaaaccaagaaacttctagtttgaaatagcggctgtactttttctatatcgctgcatcccatttaatacatattcttatccttaaaactataagtataaataaagctgaaactccacctaaattttttcaattcattattcctttttaccctatcctatttgccgtccttctcattgttaattggataaatttgtgatatccttttagtattaagtgctattaaaaggaggatataattttgaaatgtccacattgttcagaagaactaggaataaatgatgtgtgtataaatcctatgtgttcttatttcggtaatacgattaaaaatactgaaaaaactaatatagattatactgaagaaaacttaaatagtagagttaatgctgatattaaagtagatcatgttgaaaacaactccaaatctaatgataactttaatcaaaacaaagtctatcataatagaaatgactattataataatcagaatacaaacaaatttaaaaatatatattctattccttacaataaaagcaacaatatttctcgagaagaactagctatctttattggtaataatagcggtttctatattaagcacctcaacaaatataacgataaacataaatttttatcttggaactggccatgttttttcttcggttactattggttattatacagaaaactttatattccaggagctgctttgatactcttaaccttagtatcttcagcgatttttccaaagggaatacacttatctttgctactactcataagaattatattaactttatatgcaaattttatttatcttaacaattgcgaacgtaagattaaagacttcaaaatgaatgttatcaatatacaaaatctcagcaatactgaatatataaataaattacgtaaaaaaggcggagttaatttagccgcaccattaattgtattagctctccatattatgtttatagtaatttcacttggcatgtggctttcaactaggattacaccacataaattttcttctccttcgtactacttttagcttgttaaactaaaagttcgagtatatccaaaagtttgcatcttagttggatatagggttcctcattgaaaattcgagatatctcaagcagagaaattggatacatatttgtaacctcaagggtcataatatgaaataggcatttgaaaataagctgcctaggttcttaatggcaggttgttctattcattgcttgtcacactgaaagtgggaacatgcagtgatgggtgcaacctaccatttagaaccttccagcgaaattttcatagtcgtatggaacaaatatgtattcaatttcggctggtatccacataaatttgattttcattgcggaatcctatattaaaattttaggcgttcaccataataactaataaaaatagttatttggcgaacgccttgttatatagttaattataaaactttagataaaaagtctattgtacgtgggtttttaggattcttaaatacttcttctggagttccagattctaatatttttccttcatccataaacaatattctatctccaacttctcttgcaaatcccatttcgtgtgtaacaactaccattgtcataccttcctttgcaagatctttcataacatttagaacttctccaaccatttcagggtctaaagcagatgtcggttcatcaaacaacataacatctggctgcatagctaaagctctagctattgcaattctttgcttttgtccacctgataatgatgatgggtaagcatttattttatctatcaaaccaaccttatttaataagttttctgctatatttttagcttcatctttagagattccttttactttaataggagctaaacatatattttcgcatactgttttatgaggaaataaattaaattgttggaataccatccccattttttctctcatcttatctatattagttgcctttgatgttatatccttatcttcaaaagtgatttgtccagatgtaggagtttccaataagttaagacatcttaaaaatgtactttttcctgatccagaaggtccaattacaactacaacttcacctttgctgatatgctcatctattccttttaacaccttattttttccaaagcttttatgtaaatctttaacgtatatcacttgctttcatcctcctttcaacataacctaaacatcttgtcaaagtgaaagttaaaacaaagtaaactactgctgctacaattattggttctaatcctaaagctgtatttcctcttacaatacttgcattgtacataagttctgcaacacctataacagaaaccattgatgattcttttattacagaaataaattcatttccaagagcaggtaatatattcttaaatgcttgtggaattataacatgaaccattgctaacccttgattcattcctaaacttctagctgcttccatttgacctttgtccactgcttcgattccagctcttattatttcagatatatacgctgctgagtttaatgctaaagctattgatccaacagtcatatcaggcatatctattcctataagcttaggtaatcctatatagattatatagatttgaactagaagtggagtacctcttacaaattctacataagctgctgctatatagcttattggtttaaattttgaacgccttaaaagagttaatgcaagacctaagattgtaccacatagcactgcaaaaaatgctaatacaatagtgatttctgcaccttttaaataatattcagagtattttcctaaaaatgtaaaattcaatattttccctcctagttctttatctgatgtctagccactataatactcccacaatatatgaaactcctcttcctaaagtcagatgagtaaccgattcacactgaatcatatatttaggctacctgcttaagtaatatatacagtaacacgaccctaaataagttcaactaatatccagctaaggactcctcccatctgaatcaagcttcacttaataatacacatataataaaatagtcactaatttttaattataagacattatctgataattttcaactgttgttaatttccaatataaaaataattttaaatatatatatttaaaaaataatccttcatcataattctaaaaatattacaagaattttagccacaattgtgaattgtgaaacgtgcattgtgaatttacaacatatatctaatactcaaaaaaataacaagctatgatgtcagtatattttgcattctactatactggtatgtattaccttatagtttctatatgctaaaaactttcattacttagtacaaggtaaaacttctcaggtgaagctctctttatcacccggtttcagtcaaacttatacccacaacgggtacaaagtgattttaaataatcccaatataacttctgagattttaaataattttcatgaaggaataaatcaaattatctaaattcaccttgtcaataacaaaatatatactacatctctaactcgttattttctatcgtaccttttagtgccgaataggattaatctactagtttatttgcatctaatacaaattgctttatcttatcttcatcttttaatctctttattgtcttattaacttgatctgttaaatcagttgaaccttttttcatagctatagcagatccaccgtctggatctttaacttctaatttgtcagcaattgcgataccttcgttcttatcaacatttatttgagcaactggttgttcagctaaaactgcatcaactttattattctttaaatctaatattaaatcagtaactttgtctaatgatttaatatttgctgcatcaaagttatcctttgctataccttcttgtattgaacctttttgtactccgattttcttattttttaaatcttccattttagttattccagcttcatcacctgatctaagtacaaatctatgtgttgcagtataatatatgtctgagaaatctgcattttgttttctttcatctgttggagtcatacctgcaaataccatatctattttatctgattgaagtgctactaacaatccatcaaatgccatatcttttacttcaagttctactcctaaatcttttgcaatttcttgtgcaatatcaatatcaaatccaactatcttatcttttccatctacttctttatggaattcatatggtggataatctgcgcttgttcctattacaagcttaccttttgattttattgcctgtaatgcagaagcattactgcttgtgttttctttgtttcctttagtgctgtttccacagcctaccatacctattgcaatagctgatgccgctgcaatagcaactaatttttttactataccaactttcattattaatacctccaaaacttttctctactaacgatagcataattatacacacttttttatatttactcaatagaaatatgataaaaagtttaattattattcattaaaattaaatttatcctcattacttattatatatttaaatatatattttatgtattggaaatagttatatatattagtattataaggcttgcaagcttgctttaagcgttttttaatcattttaaaattataaaaaaattttatttagtatttctataatttaaaattcacaaaaaatcatgaaattttattctcattaaatttatattataatttttcactttgcatactttatgaaaaattattcacataataaaaaataaaagcggcaccatcataaatatcatgttatcggtgccgcctacttattatttaaaattgattatctagtttagtatatataaatttcagatagcatagctcactctatataaaattctttattttatatagccgtatagcttttaagataataaggcctgagagttaagtttttataatgtaactatattaaatacttaactgcagacaacctgtgcaacgccctggtacacattatatatttaactaacggttcgatctcttcactttctactattatagctccatcaaattctaatccttttgctaaataagctggtagaagtacttttccacccttatacataatatcatcattatctaaactttgaacattgatcttttctttaataacatgagagaatttattcaattcatttttgtccttaaagattactgcaatattctcgtatccctcttcttcataatcttcaattaatgatattattgtatcaacaaattcctcattattagaaacttcttcttcaataacaggttctccttttctaaccaacggaacaatcttgtctttatccaagaatttatttgaatattccattatctcttgagttgacctataactcttatttaactcatactttgtaatttccacattaagatcgttaaatacatcatcaaggtgaagcattgcaggttcttcactagttgttattaatctctgatttgaatcaccaacaattgtatagctcttacaacctgttatttctttaattatttcaaattgaatgaaactataatcctgtgcttcatcaattacaatatgctttatctcattttttacttttataccttttagcttaatcattaaataaagtatgccagataaatccatatagcttagtctttctttattctcacctaagtcttcattattaatattctctaagtcattaatatagtttttatcagtatctaaattaacaattttcttataaatatctattactggttcgtacttaatccaagtatctaattcatcacgagatttcataaccgctcttacaatttctcttatcttaattctttttaaatattctagattatttttttctatttcaagttcattctctgataagctgctaatcttttctttaaactcagcatttatcttataaacttcttcatctctcttatcttttattttagatattaatattctttttattttctcacttcttctaaacaaaggcatatctttataataatttgtaaatagttcctctatctctttagctgtaacaatctcttctttcttaaatctaattggttgtatcttaaaatattccttatttaaaatttctaagttagaatttaataaatcaacaaatgccttagaactcttatatctatattcttctaaagtatcttcttttccattcatagcatcttcaatatagctaccgaagctctttatattttcatattttaaattaatttctttcttcgcaaaattttcaaaggttgtttgtttaatattactttctccaagcgaaggcaatacttgagctatataatccataaaaatatcattaggtccaaagattaataccttatctccaaattgttttctaaaattgtataataagtatgatattctatgaagtgcgatagttgtctttccagaaccagcaaccccatttacaacgactattttatttctatcctctcttataatctcatcttgttccttttgaatagtcattactatatcttttaatttatctgatgaattatccgttaaaaccatttgtagtatttcatctttaacatctatagctgaatcaaatactccctttaactggcctttcttaattacaagttgctttcttgataatatgtctacttctatttctcctgaaggtggattataacttgatttaccaagagttcctttataaaaaagtgatgcaataggtgctctccaatcaacaattaatggttcaaaactattttctagcgtcaatccatatctacccacatacatatcttctggaatgtcttctccttctttaaatgaaacctttccgaaataaggtatttccttaagctttgtaaattccataagccttttgtcaattgttctataggcttcttccttcacataattttcatgatcaaaataatctataatctggtcttcatcatctttatattcctcaacgtatttttttctagcctcaaggatatagtttgtgacattctttcttttttctaaatactttaaaatttctttatttagaatttctaaaatttcacttaacttttcctcttctcttataaaatctacttgtttgctcaatattgtgacccccttagatcaataggcagttaattcatcacctttaagtattatatagggcgattaactaccaataactaatcttttatttcttcctgtgaaatattattatacccttatgccaatattttcacaccaattccatgaattttgtattgttaattatacatttaaactataaaatgcacaatgtatggctaaaaactctttttaggtttcattcctccactgtgcattaaatactatatttacatttttatagttctctatttctaaaaatattatcttatgaagagccgatggcttttcttcattaacttatcacttgaaacctgtcattaatgtcaacttatttatttaaatattatcagtttcagaatcctttttatcagattcctcttctttagatatagatctatcatcattaatattttcagctgcgccttctgccttcgcatcactttccataattacagatgtttgattacttgttattaattctgatttccctaaatcttgaaaatctctttgtgacttttcaggcttatcatctataacaatatctaaagcatgctttttagctcttctttctgctaactcttttactctcttttcgttctctgatttttccttttctttttcttccttcatttcaggatatttttcatagactaaatcaaagaattcttctccaaatattgtttctttctctaaaagtacttccgaaattttatctaataaatctctattatctctaagaatctgtctagcatttgcatgagcatgctttattattcttagtgtttcttcatctaaaatagtagaagtctcttcgctacagtttctgacagctctaccatctagatatctattttgcactgattctaaagccatcatatcaaatctatcactcattccgtaaatagaaaccatgcttctagcctgttgagtagctctttctatatcatttgaagctcctgtagaaaccaaatcaaatacttcctcttcagcagatctaccaccaagcattacagtaatttgatttattaattcttccctagatgtcaaatatttttcttcttctggtaattgcatagtataacctaatgctcccatagttctaggtactattgttattttatgtacagggtctgctcctttaagcatcgctgcaacaagtgcatgcccaacttcatggaatgcaacaacttctctttccttaggtgatagaattctatctttcttttctttacctgcaattataacctcaacggcttctcttaagtcctcttgaagaactgtttttcttcttcttcttacagctcttaaagcaccttcattaatgatattcgcaagatcggctcctacagcacctggagtactcttagctatttcagctaaatccacatcaggtcctagcattacattctttgcatgaacatgaagtatagcttctcttcctttaaagtctggtctatcaactataactcttctatcaaatctacctggtcttaaaagagccttatcaagtatttctggtctatttgtagctccaagtaaaactacacctttagatgaatcaaatccatccatttcagaaagtaattgatttaaagtttgttctctttcatcgttactttgcatttgattatctctgctcttaccaattgcatcaatttcatctatgaaaataatacatggagctttagctactgcatctttgaataattctcttactcttgatgctccaactccaacgaacatttcaacaaaacttgaacctgaaagcgagaaaaatggaactcttgcttctcctgcaactgcttttgcaataagagtttttcctgtccccggaggtcctacaagtaaaacacctttaggtaatttagctccaatttcagtatatttggctggcgcatttaagaagtctattacttcttttaaggattctttagcttcttcctgacctgccacatcatcaaaagttacttttatttcactttccatgtagaccttagcgttatttttaccgatgcccatgacaccgcctccgcctccgcccatcttagagaataaaaatctccacatgaagaatataagaaccataggcaatatccaagtaaggagaatattcatcattggtgattctttaggatttttacctgtaaaatcaataccagctgcattaagcttagttattaatgtttcatcctttacatttgctgtatacaaagtttttcctttgtactcttcattatcttcacttggcgttattaataagttttctgtagttatagtaactttagagatctctttattatcaagcaatcttaaaaattcgttataagtaatctcttttgttgtagcttcttctcttgcataattaaacgccatcaaaaatgcaaaagctattaaaaaataagtaattgctatagtaaaagaattcttatttttgttattctttttattaccattattattattctgcatctaatcaccttcccattatatttattaatcattatgtccaatactgtactacttttatattcatcaatttcctatataagtaacacaatttcagacaatatagcatttcatttaccttttcacctttgttacaagttaggctaaatatcaaacttaattatatctgaattgattttgaatttatattttattaatattcataaatcagctcattcttcccacatatctttcatcttattatctatttgttttttgcgaatttctgtggactttttatctactttaaaatatttattatctatattaattaaaatatctccttctttaaaatcccctgtaacattcctaatagatattttatctatatccctattttccttttcaattataacataatttccttctactctatctattatatacttttcactcacttagcatcctcttttcacagtataaattaattccaagaatagtgaatagcttacttagagagcgaacgcaagtaagttttcctctaatcacctaaattatacagtatatctatgaaaatatcaccaataactcttagtaatcactaaaaaataacaagtgagcttgctagtctatcttgcaccatattatattcttaagtcttactattaatttaagcttccaaaatctttaaatggatagaattttaatacagctcttccttctatatttgaggcatctatatatggattaatccatcttcttgcatcatttgatcggctcctattatctcctaaaaagaaaaacttattttcaggcacatcgaaaaccccatcaaaattttcattattttttacataatcttctttaatatctgatccatttacagtaacagtaccgctgtgtatttcaatgtgatctcccggaagacctataactctttttataagaacctcatcaagttcctttgaatagaatactgctatatctcctctattaatcctactagtgtcataaattctagttactattaatttatcgccaatatttaaagtaggaaccattgattcactaggtatatatacggcataaatcagaaatttatttattaaaaaagccattcctatagctgctattataggaattatccactctctaaagaaagtgctttcaaatgaaaaacttcctataatatttttattagatagcaattctttattctcttttttgtctaattttttctttagaaaatcgttatctgatttattagtgatgttatcagaacaatttaaatctatgtcctttgattccattatataatcattttcattcattaaatgttctcccttttgcaagattcgtttatcttataccacatactaagtattattcacactttgtaaaaaatttaactcatattattttaatatttcaaaatcttttataggataatactttacttgagcctttccttctatatatgattcatcaacgtaaggatctttccaatacctagaatcatctgagttagctctattatcacctaagaagaaatacttattatctggtactttaaaacttccattgtatatctcattatttttcacatagtcttccttgagctcctgaccgtttctataaacaacaccatttttaatttctattgtatctcccggaagtcctattaatctttttattaaaatctcacccttaaattcgtcatttttaaataatacaatatctccttcttttaaatttttaggattatgcaccctagttactatcaatctatctttaacttctaatgttggaatcatagatccacttgtaatccaaacaccgtatcccacaaaattccataggagaagcgctatgcaaagaacaactgcaataacaattatccattcatttaatatggacttctttttttcttttttatctgctacaatttcatcttcgttattttctgccacaatattacctccatgtcccatattacacataatttttcattaataccccattttttcataatccttaattatataaatcatttcacttaaaaagttcttgattttgctttgcgcttttttctaattaaaatgatcttggttgcgcttcgcgctttttctaatttaaaatgatcttggttgcgcttcgcgcttttttctaatgtgcatattttaatatgctatattagtataacatattttactatctaaaatatttataagatgttaattttataacaaaaatatgcaccaatcttaaaaattagtgcataatccttttaggaaatctatataatttaaattcttacttaaacatattcaaatacttatatctattcaacatcattctttaatagatcatcataagattctctcttgcaaataagtcttgtttcattatctttaaccattacaaccgctggctttggtattctattataattgcttgacatagaataaccatatgctcctgtagtcattattgctagaatatctccgcttttaacttctggaattttaatattttctaataatatatctcccgattcacaacattttcctgatattgtaactgtttcttctctatctccttcaactccacttgcaagaatacattcatattctgcattataaagagccggtcttatattatcagtcattccaccgtctactgatacatattttctaacactcggaatttccttgactgatcctacagtatataaagttgttcctgcattagctacaatacttcttcctggctctattgtaagaattggcctttcttgacctgttctcgcacacacttcatcaactttattaattattgtgctgcaatattcttcagtacttcttggttcgtctccctcggtataatatataccaaaacctccgccaaaatctacttcgtttattaggtaacctaggttttcctttgtatttctcacaagttctaacattatttcaacagcatcttcatatggctctaagtcaaatatttgcgaacctatatgacaatgtattcctgcaagatttatattctctaaacttatagcttttttaatagcatcttctattacagtaccaactggagcaaagccaaattttgaatctatttgtccagtctttatataatcatgagtatgcgcttcaatacctggtgttattcttaaataaatattttgtaccttattatattctttagctatatcatttaatgcgtctatttcgtaataattatctactacaaaattacctacacctagtcttacgccaagttcaatctcagatagagtcttattatttccatggaacataactttttcaagtggaaattcagacttatatgcagtgtataattcccccccagatacaacatcaagacacatattctcttccttcaataatttacacatttgaagtgtcaaaaatgcttttcctgcaaaagctactctattattattctcttcgcacttgaaatattttctataatccctacagtattctcttattaaatcttcatcaaatacatataacggactcccatattctctcactaaatttttagcactgatgcctccaatcattaattgattgtcttctactttcattgttccaaacaacttcatttgattaacccccaaattatattttattagctattgcttcattgattaaaataaatcacaacaccaatttcaataaaaaatatccgttttttgcattaactccggattattgctgttgtattaactaataattataataaaaaacaaacgccacagagtatatctgtgacgagtggtagatctttacgctaaatttatgcacaatattttcattaattatcaattcttcgcaaaagattaataaatgaatttgaacgtctatactaacaaaatcattattattcttttcaaactgttaatttataactgaaaaaagtaccttgtagctcaacactcttcgtgacagttattcacatattctatgaatacccagaaaaagattatcgcataataatctattttcttcggctgtaataccttttagtataaatcaacgtttgccaactcctcatacctactatttattgcagcacctctaccccaggtcatgttatatattatattattagaattcattaatattttaatattaatgacattataaatcattatctgcacaatatcattttattaaactgttacaaatatgataccataaattaaacttaaagcaatacttttttaactttaaattaatggtataaaacccaagcttattaagttcctattctttcctatactcatccataagatctcccataatacttgctgatgttggtggtgtaaaagttatagcatttgctccagcttgaattgtctctttaattgactcttcagttggtcctccagttgctattatcggaaactctggaaatctctttctgatatttctgactatattagcggtatttcttccacctgaaacattaagtattgtagctccagcttcaatccttttagcaatatcttcatcttcagaaatgaccgttactattactggtatatctattgttgacctaatcttattaacaatttcattactcgtaggtgcatttacaacaactcccatagcacctttgaattctgcatccatagctaaattcacaactctttttccttgtgttattcctccgcctacgccacaaaaaaccggaacatcagcggccataacaagtgcctgtgttattacaggctgtggcgtaaatggatataccgcaataattgcatcagcattgctatttcttattaatgctacatctgtactaaatagcaatgattttattctcttcccaaaaattttaattccaccacaatttcttataactgccggaacctcaattacatgattcctaagcgtaccctttatttgaggaacatatttaacatctttattggtcataatttttatcccctccccattaactatcggttagatttttataataaatttctctagttatacatttttcttttattgtctttatagttatactttcctataaattaaacctctattaaaaattttctaaattaaaattatctttcgcatatatacttataattataatatttttaaaataaatcacttatcttcatacaatatgttaaattccattaattactatttatattatactactttctcgtatttcttaaagttaaattttatttatccacaatatccacagtttttatccacaaatatgtgcatattgtttataaatacatatcattaaatttctcaacgaaaaattgtcatgaaagactttctacaaatttctctctctataatcaattatctccacatttattgaaatcaagtccataattaattttaaaacattcataaagaactaattgaatatcatatttgacaattaagttatccacagattttatactattatcaacagtataaacaagccttgtatttacaaggctaagccttagttttattttatatcatttaagtttgtccacaagtttattcacaaaacttcttgttgaagcgtataattacaaaattcgattttataattaatcatatttatgtggataataatagcactaccaataaaatactatgggcatacttaagaatttcttaatactttgttaatttctaagttacaacaccttaataaaacattaaagtataaagtaatatcttgtggtcttttcattcctatcatatacttttaatcaggaaatatattctgaagttaggtaaaaggagatttattgcaatgacccaaaatgaattttttaacattttaatggatggtttaaaagactttcctgaaataaagctgcaagatattatttcttattatgaaaattactttaaaactagattaactgttggaagaacagaagacgatatagcaaaggaattaggtgatcctaatttaatagttaataaacttagaaatgaacatttgcatattaccattaccttagataatttaactaataatgctagcactgaaactagcgacgagatttctaacatagatgccactgatgttagcactgataataaacatatcaatgcatgtcacaattttaaaactaataaaaagttcagtaatatctattcagaaaacaagaatgatttaaaaactgattccaactttaatgattttaagtctaataattcttatgcttcaaatgattgtttttatgaccttcataatgaaaatatatcacttgatattcaaaaaagcaattataaatgtgctgaattaaaagaatcaaaatataatatcaataatgagaataactttaaacgcagtaatcatatttccttcatctcagaatttaattttaatatgcgtcaaataatgagtatttttaataataaatctaaaaataagatttctaacttcaacataaatattatcttaaaattttttattgtaatcttatctttagtaatattctttccagttataactggtgttattggctgctttatcggactcttgggaatagcaataagtatttttatcgctagtattggagtactaattggtggaacttttacaaacttttttacgctacctaatattccagcatttgtctcgaattttccatacccggtaatagtactattttctttaggttcactctcattatcactgcttttaatgattatatttttctatctctgcaaatttctcatattaattttggctaaaacatataagttcttaaagtttaaaggtggggagtcgctatgaaaaagaaattcatttcttctaatatgaagatatttatgttaatactattacttctatccattacattttatacttctggatgcattgctctagttcaaagtggctacaaactttctaactacgccgatgaacttcatctaagccccagtgccttggaacataatttgaattttaacaatttcaacttggattttaatacttcatatctgtctaaagattatgtcctaaatgataatgtcaatgagattgacttcagcttaaactcgcaagatattaaagtcgttgattatgatggtgatgatttaaaaattcaaatcaaaagcaacaataatatttctaatgacttgtatgaaattcaaagtggtaatagattagctttcaacgctagatatgatactcccagtgacgcaagtatttcagtaagtataccttataattttaaagataagagcactttaaaaataaccacaagcagcggcgatataaatatttctagcttatcattaaatacacttaatctttcatctactagtggatctatagctctttcagattcatttttaaattatttagacttaaatagttccaacggaaatataacctttgataatatagaaacatcaactgaaaccaaactatcttcttcttctggtgatattattggaaatggtaacttaggaagtataaatggaaatactttatctggagatatcaatctgagaataattgattccttgaacaatatgtctttaagctctcattctggatccatacacttatctataccagaaggctcaggctataaaataaactacgaaacgaaatctggaagcttaaattctcctaacgataaattatcttccggcgatgaaagttctcttataaatattactactgaaagtggaaatcttaatataaagtaaaattttaatgcacaatgacaatcttatactaattgttcattgtgcattatgttatatatcctatagtttaaactttgaaataatactgcttagttcttctgccttaatagcttccttacttattgtttcaactacttgtttcatagcagttgatgtatcatctattccctgttgtatgctatgtgtactaccggaaacctcctcagaattttttgcagtatttgatatagctgcactaacctgttcaattgatacatttacatgttcagacatctcagctatttttttagacattgcacttacaaactcaccatctttagtatattgtaaagcgatacttccgtatccttctaaatcttcttttacattagttttaatgaaaccaattatttctttactattctctgaaagattattaaatgctttttctactctttctatagtattttgtatagtaattacagatgatgctgactcctctgcaagctttctcacttcctccgcaacaactgcaaaccccttacctgattcacccgctctagcagcctcgattgctgcattcaatgctaacaaattagtttgctctgctatactagctattgagtccgccattacttttatctcttctactacctttgattcttctattgctttctttatatgttcttccttttggttatatacaagtgctgtactttcaattgctcttctgctatttttttctacagccttagctctttcctttataccatttgaattatcattacctttttccgcttgtgcttctaattcttccatattggcatttacttgttgaattgatgcatatacttcttcaacattgctactattatcttgtgtttttgaatcgattttttcaaactctaaatttatattttccaaactagttgatatttcttgaacaaccgcagatgcttcttcacttaaagcggacacatttgttgcgttatctgcacacacttctatcatatgccttaaattatcctgagctttatttaaagcttgtcctataaatccaaattcatcttttcttgtaattgtaatattagttgaaatatcatattcgctcattctttctgctaacttctttatttcatgtagtggtgtaattattttacctaatgttgtaactacaaatacgccccctaatataacggcaattcctacagctatagccgtaagtgtcgtactagtttttatccctattcctatcccaattccaactaatgccattatgaaatatccagagaaaatttttactccaacagactgtaataaactaatttttttgtcttcgttcatataaaacaccccttctttctactttatcatctaattaatacttatacttaattttattaaaatcatatatactttgatttttaactactatgaattacctaatacccaaaagattctctatacatggtcaatactactggttaattaatatactgttatattaatctataataactattatccactgaaaccgttctaccatatctcaatacctaatgtaaaatttctacttttttgtacacatattagcatatcatgcgatttttttattttcaaccacattaattaaagtttcacgttattttaagcttcactaaacttaaatcaatattggaacatataatataatttctaagcgctcactaagatacatattatattttagaaataaatttatatatataagttctaattaataaaattcattgcttgttaactcatgtttatattatttgataagtttgcacaaaataaatctagatttattttggtgatcccaatgatgaatttaaacagaattacaatagaagataatcagagtgcagtattagaacttgaaacagcaatgacagaaactaaaagtgtacgaatgtataagcggtactctgtagttttaaaacacttccaaggttttcaaaataagataattgcagaaatggaaggattagaagagcatgctgttggtaactatattaaaaaatataaggccaatggattagaaggtcttgctatgaaaaagccgcctggtgcccctagaaaattaaattctgagcaagaacaaaaacttatttatgtaataacaaataatacgcctgacgaagtgggttttgaatcaataaaaaactggactatcaaactaatatgtcaatgggtcatggttaattttagtattactataaaacatagtagtatggcagttatacttcacagattaaatttgagttatacaagaccaacatatgttttaaaaaaggctgataaagaaaaacaagaaactttcaagaatgattttgaatatctaaaaaaaacaccttgatggcttagttgatactatcttgtttcaagacgaatcaatgataagagattatcaggccattcaaaagacttggtttataaaagggaaacaacgaaagatacctacttatggaaagaatgcaggcgtaaaattaatagggatactagattatgaaagtggtcatgtatattgtgaagaacacgaaaaatatgatgctgtagtttttcttgagtttttaaagaaggtgcttacgcaatacccgaagggtaagatagttattattcttgataatgctaaaattcatcatgctaaattgatacaaccatttttggaaaaactgaaaaatagacttgaattaatgtttttacctccatacagtcctgacctaaatctaattgaggggttatggggatggttaaaatcatcagtggtaaacaatgtattctttaaaagttggactagtattcgagttgctatacaaaacttcattggaacaataaataaagttcctacacaaacaatagacaggctatgcgttaaaatgtagcaactttattagaacatatatatattgtaattcacaatgcacatttcacaattcacaattttgggtaaaacctttttaatatttttagaattatgatgaaggtttatttttgcaatatatacataaatcttacaagttgagttccaaattaaaactaaaattatgtaaatttaattgtaatatattcctaaataaatcactgtgttattaattattattacaaaatgtgataaactatatatatcaatcaaattgaatgcactttcaaaaattagaataaaatttaaatataaatcggggggctagaaatgatatcaaataaaatgaaatctcttgttgcaaataattccattataagagctatgtttgaagaaggaaaaagattatcagaaatatatggagaagaaaatgttttcgattatagtatagggaatccaaatgttgaacctccaagtaaagtaaaggaagttatctttgaaattttgaatgaagaaacaccaaatttagtacatggttatatgaacaattctggctatgatgatgttagaacaaatataagtgattttataaaccaaaaacataacttacaactttctaaagataatattgttatgacttgtggggctgcaggcggattaaatataatcctaaaatctatattaaatccagatgacgaagttattactttttctccttactttggagaatatgggaactatgtaaaaaattttgatggtaaactagtaacttgtcctactaatactgaaacttttgagcctgacttaaaggctttaagtgaggttattactcctagaacaaaagctttaataataaacaacccaaataatcctaccggtgttatttattcagagaaaataataaaagacttagcaacgttacttaataataagcaagaagaatttaatacatcaatatatttgatctctgatgaaccatacagagaaattgtttatgatgatattgaagtcccttgtattttaaaatattatgataatactttcattgggtactcttatagtaaatctttatctttgcctggtgaacgtattggttatgtagttgccaactcatctatggctgattttacagatatgatggcttcactaaatattgcaactagaattttaggatttgtaaatgctccatctttattccagagggtaattgcaaaatccttagatgctgaagtggatgtaaatatttataagaaaaatcgtgatcttttatataatcatttgatatctcttggtttcacttgtgttaaaccacaaggtgcattttacttatttccaaaatcaccaatcgatgatgataaaaagttctgcgaagatgcaaaacaatttaatttattacttgttccaggctcttcgtttggatgccctggacacgtaagattagcttactgcacttcatatgagaaaatagaaaaatctttgcctgcttttgataagttagcttctctatataatttaaaataataaattatataatttaggtagatataaatattactcaaataatatttatatctattttttataaaaatatgatttctattattttttcaataaaattactgtatcattctaagcttctcatattctaatttctttacagttatatataggtctattaataatatagagcctcctaaaactacaaagatattaataattttcatattctccatgtataagtcatatagactgggttgcaaataataaagaccaataaggctaagcaccatccaatatatagagaatctaagagtgacaaatccatgaatattatacctaaattcagaataatcccagtatactttgttaaaagagtgcttaagtatatacccacttatatattctactgtcgttggtattaagaaacataataatattaatggaattccagaaatctctaacagttcattgcatattatgagaaacataactgccattccgtacatcggcttaaatggtcctattaagaaaccatcttcttgaaacttttttgtagttgaaaagctataaccttcctctaatatccaccctataaatgaataaaatataaaattaaataccagataaaacactacattcatattaatcacctcttctaaatatcaatgcataaaagatacatatctttttgtacacctaaagtactaatattatttgtagggcttaactcttttatcccgtaaaaaacttctactatagggtaataataatttttaaggaaattttgtacctatttcttgattcttaaaaatgcaatattaatgaactatctgctataatgatattattgaacttttcttagactcaggttaaacaaactataaaaattatttatagctgagccttagatattattatattttaggaggctaatttacatatggaaaaattatattatgataatcgataccttaaagaatttactgctgaaattgttgatataaaagaaattgataataaatttcatgttatattggataaaacagcatttttcccaggaggtggcggacaaagctgtgatattggaactctagaagatcaaaaagttattgatgtatacgaaaaagaggaaattgtttatcatgtggttgaaaagaaaccactcaagatacataaggttaaatgttcaattgattgggatataagacaagatggtatgcatcagcatttaggtcaacatgttttatcaggatctttcttcaacctttttaacgctaatacttttgctattcacctaggttctgatataagcacagtagatatttatggtgtcttaactgaagaacaagttagagaagcagaaagacttgctaataaagttataggggatgccttacctgtagaatcttttgttccaactaaagccgaacttaaaaagttatctcttagacgtgctcttccaaatactgaagaggatattagaatcgtaaaaataggagattttgatattaatgcttgctgcggactccaccctacatctactcttgacttaagacttattaaaataaaaaaatttgagaaacataaagagggaacaagaatagagtttctagctggcgaacgtgctatttctgattcatttaagaaagatgaatttcaaacttctatatgcagatatttaagttgtaatgaaaatgaagctataaatggtataaagaacttaaatcaaaatcttcgtgaagctaatgaaacaaataaaaatcttaacattctactagctaaatatcaagttaaggaaattcttgaaaatgcagctaaaataaataatgttaaagtaattaaacaaatatttgatggtgaaaacctaaagtatgtgaataaccttacttctaagcttatcgaaaatgagaacacaatagctctaatggcagtaaaatctgatgaaaaagtaaatctattatttgcttgttctaaagacattaaagatatcaaaatgaatgaacttttaaaagatgctatatctcttattgatggaaaaggcggcggaagtcctttccaagctcaaggagcaggaaaaaataattcaaatttagaaagtgcaatggactatgcatttaataaagtatctcaaattataagtgttgcgaactaggtgaaatataaaagcacttacaatatgaggaaattttaagtttactgctaaaccttcgaaagggaatatgcgtttgtttcggtcctttgaagattttgcttaagttttctaagagcacaatccaccatattgatttctaattatttcgcgcctagatatctaacccaaacccaaacatataattttaattgtagtatataccagaaagaaaggtcatacttttgtggaagtgttgcattgagcatttagctgtagatatttccttagtagaagttgttccatttttgcttgtcacgagcttgcctcgggagcatgcaggaatggtgcaatttttcctattggaaattcacagctaaatactccagcaacctggaacaaatgcatgacctttctttcggtttttatatataactttaggtatctagtacttctcaatattttacatttaagaatttatatactatgatattacgaatttatatctttcgcctataacgtactgttttcctatatgtaccggtctattcttatcatcataaataacagtctttatataaaacaaaggttcacccttttgcaccatcaatagcgcagcctcttcatccatagcttttgcaatttctattgtggtatgatcatttcctgagttaggcgaatcagatggatttatatcatatttatctcttaataattcatatagtgaaccacttaaatcttctgttagtaaaaaattaaaccttttaaaagaaaaataattattttctagcattaatggatctccacctgcaaatctaactctttgaatatatattaacttatcatcatcatctagttctagatctttcttgtcttctattttgggctccattacctctcttttaatgatttcattagttacttttaagccactggcctcacaggcagcagtaaaactagataaatattcaattttcctctgaacttttggcttacttacaaatgttccttttccttgtttttttataataaaacctgactcaactaattcatttatagctgcacgtactgttatcctactaacattatatttttcacttaactcaacttctgttggaatcttatctccatattttaattctccgctcgttattgaattacgtataatatccgctaattgttgatataaaggaataatattatcttgtattagcatataaagactccttttaaacatctataatattaactatatactatcacaacatttttgaaacttcaattaatctattgttgtgataatatcaattctttgatttattacagtaatcttaaaatagctgtttgatattgctcattaaataataactattcaacagccactatacttttaattaatattttttaccatatccaaatgagccttctactagacatgttttagctgaaaatatagcaccttcatttagactttctttaattatattttccctatacaattcattttctttaattttgcttatgtaatttatcaagaatgctgttatgaatgaatctcctgctcccattgtatctacagcttcaacaagctctggctcttgtgaatagaacttagttccatcatataataatgcacctttttctcccatagtaactactactatttcacttccaagcttatgagctttcatcactaaattaagcatttcatcggtctttaaatggctacatgagaagaaactaaaatctactttaggcgcaattctttcgacttcttcaattgtaaaatcatcagagaaatcaaaagatattggaatgcttaatgctcttattttatcaagctctggttccgtatatccgtataaacctgcatgtagtaaatcaaaagttttaatgtattctaaatcatcttgcgtaagatttaatccattttctcttaaaactccaccttcattgcttccaagaaaaactctatcaccatcttctaaagttactcttgcgcatccattttctccattaaaatgtctgcactttgaaatatctaagccaagttcatgaattgtattttgaacatgatctgcttcagcatctgatccaaatgcacctaaaaatgctgaatttattcctattttttttgcataagctgcaaaattcaatgcatttccacctggatacattgttctaatatgctcatatttatctacaacgttatctcctaacccaataacttttaccataatatcttctcctacacttaaatattttaatattcaactttccccatatatcttctggtatctaaatcatggtttctaagttttgctaattcttccctatacacacataagatgctatagaatactataggattaaagaattcaactactgaactatcaattacactaattccaagttctttgcaatcaacaacttcaacttttgcaccatatttatttaggaatttaagtgctctttcatctaattctctagttctaccttcattcattaataataaatatagtgtttccttatcagttacttcaaatggtccatggaagtactcacctgagtgcactgctgatgcgttcatccattgcatttccattagtgaacatattgagaatccataggcatgaccatatgatgctccgcttcctaatacatatgttattggctcatttttatatttttctgcatatttctttgctctttctgcaactaaaccttggcctctttttacaacatcatttacaatctttaaaccttccataaatttattatatccttcataaacttctgtttgatttaatatttcgactgctatatttagaattattgccattggattgtcttctacgcttgtatcatttccccattcgtaaaggatattgtaatctgcatacttaattaaatctgcatctttattatgtgttaatgttatagtcgctgcccctttctctctagctactttagctgcttcgactgtttcaggagtatttccaccatgtgagcatgctattactaccgaattttttcctaatgattttggtgtcgcatgtacaaattcattacttgtatatgataaaactcttaattctcttgcttcactttgtaaaaaatattgtgatgaatacatatctactaaagacccaccacatgctactaagaacacttcctttattccgtcttccttacttgatctaattttccctacgatttctctaatattcattgttattcctcctatatatttataatctcattctacgaatttatattttttacattggcaaatgcttacgatcattaacccaaatagtaatgtataagcatatagcatttttacttttttaataagtacattacttactgcaactaataagcgatttatctctttttaccttgcgtaactgtatcataataacgttactactaatcttggaataaatatttttcttaatcgaacctgttgatacgtattataacgtattgtataatgttatgcaacttattttaaacttaaatagtaagtatatcttttctgattaaacagtgtaatttgctagaaatattattcgccaattatttgagtatattatatagatactttttctcgaacctgattgacctattacaaaaacatctccctttaaaatataaaattattgatgtaaggaagttactgataccttacatcaataattatgtaaatgatcaaactttattcggacctaatccattaatttatttgcctctacaacaaattcatcaatttttccttcatcctttaatctttttattgttttgttgatttctgtttgcaattcagtcgaacctttcctcattgctatcgctgctccatcttcttgcgcctcaatagttacagacgtcaattctatatcattgtttttatcacaattaaatttagccactggtgaatcaagtaatattgcatcaacttttttattctttaaatcaagtactaagtcagtagcttttcctaatcccttcacttccgcacttggtaagttatcttttactaagccttcttgaactgatcccttttgaaccccaattttcttatttttcaaatcatccattgattttattgaatctgcttcaccttttcttactataaatatatttttctctttattgtatatatctgaaaaatcagcattttctcttctttcatcagttggattcattgcagcaaatactaaatcggactttcctgcctgaagcgatacaagaagtccatcaaaatccatatccttaatttcaagttctacacctaaatctttagcaacttcttttgcaatacttacgtcaatacctacaatttgatccttaccatctatttctttatgaaattcatatggtgggtaatcagcactcgttccaactacaattttgccttttgattttatatcacttaatgatgatgacttaacatctgaatttttgccagaactattagtgttactactacatcctataattccaaacgctatactgctaattgccacaaatactattaacttttttaataaaaattttttcatatattgtccccctttaaattttatcgaagtattattttttagtatttttctactaattgaataatattgctataagataaaaatgtcaatacattataatgatgttttaatacgtattaataagtaatagtattttatatgcatattatttttttctataactgttaaacagatagctcaaattaataaaaataaatagttaacaacacggaaaataaatccttgttgttaactatctataaaaattgtttaatctattctttaaattcattaaatttagaaattttacgtttaaccagattttttgaaagaatattatttgtcttattcttctattttaactacatcatagccttcttcttcaatagcttcttttatttcttcattactattttcagtttcaactgttgcacaattgtccttaagactaacttcaactgaagttaccttatccaaattttctagtgcttcctttacatgagcaacacaatgttcacaactcattccttcaattaatattttctttttcatatctattacctcccgtttattaatgattaaaatttagaaatcaaaatatagatatttgaaatacttttcttcaagcatctagatgtaattatctactacctaagaaatgtcctaatattctatttttgcttatcatcatatcttattgattaggctttaaaatttttaagtcttaatgcatttgtaagtactgaaacagaacttaagctcattgctgcagctgctatcataggatttaataatggacctccaaatacatgaagtatccccatagcaactggtatacctagtacgttatatccaaatgcccagaataaattttgttttatatttttaatggttgctttacttagttttattgctgttataacatccatcaaatcgcttttcataagaactatatctgctgattctattgcgacatcagtacctgatcctattgcaattccaacattagattgagctaatgctggtgcatcatttattccatccccaaccatagctaccttcatgttctctccttgaagctttttgacttcattagccttgtcttcaggcaatacttcagctagcactatatcaattccaacttgttttgctattgcatctgcagtttttttgttatctccagtaatcatagctacctttattcccatgttatgaagagcttctatagcttttttgctacttggcttaacagtatctgcaacagctactattccacttaaagtattatcaactgctacatacataggagtcttaccttcagctgctaatctatcactttcatctgcaaacatagcaatatcaatatttttttctatcattaattttttatttccaagtaaaatatttttttcttctatcttaacttctattccatgtcctggaattgcattgaattgttgaatttctttaagttccaagttcttgtcatttgcttctttaacaattgcttctcctaacggatgctctgaacctttttcactacttgcagctaaaattaatatctcatcctccgaaattccatttgttattatatctgtaaccactggttttccttctgttatagtcccagttttatcaaatactatagtttttatactatgagtagtttctaatgcttctccacctttaattaacacaccattctctgcacctttacctgttccaaccattattgcagttggagttgcaaggcctaatgcacacggacaagctataactagtactgcaataaatattgttagagagaatattgttgtttctcctgaaattaaccatcctattgaggctattattgctagcattataactattggcacaaaatatgctgatataacatctgcaagtttagctattggagctttagatccttgtgcttcttcaactaacctaactatttgtgcaagtgcagtatcttttccaaccttagttgctttatactttataaagccagttttattgatacttgctccaattacgctgcttcctactatcttttctacaggaatactttcccctgtaagcattgactcatcaatagatgtactaccatcaataatttctccatctacaggtaccttttcacctggtttaactaagactatatcaccaacaattacttcttctataggtattgtaatttcagcattatttcttattattgttgcagttttaggtgctaaccccattagcgctttaattgcttgtgatgttcttccttttgaaactgcctccagatattttccaagtgttattaaagtcaaaatgactgctgctgactcaaaatacaagtgcatagcatattcagtttcgcctgtttgtattttataaattccaaatattccatataaaactgccgctaaagtacttatagctatcaacgaatccatattaggacttagtttaaataaattctttattccaactaaatagaacttatatccagctatcattacaggtattgttaatactaattgaatcacagcaaaattcaatggattcatcatagaatcaataatatatggaagaggcatacctaacatatgtcccatagttattactaaaagcggaattgcaaatattagagatataataaatctccttaataacaattgacttgcctctagttttttcttttcttcaacttgctcttcttccttaattagcttataccctgctttatctacagcagctttaatttcactatatccaatttcatcttcatctatatttatagtcaacttctctgttgctaaattaacaacagaatcttgaacccccttaagctttttagtaactctctcgactctacttgcacacgctgaacatgtcattccttcaactttaaaagtataagtcttcatattcttcttaacaccgtaaccggctttaactacggttgcttctatattttcattattaagtttgttttcatcaaactctacgttcagcgtttctgttgcaaagttaacatttgcgctatttacgccttctaactttttaacaaatctttcaactctatttgcacatgctgagcatgtcattccttcaattttaaatgcttttttattcatacttcacctctttacttatttagcatatactttaaaaatttacattaagctaattttaacttcactaagcaatttacaacttttctctatatttaattaatgcaataatgcttttatattttatttcatattgtcatctcttaataatcggttctattttgaaagtaacttttctaaaactttattaaattcttctattttctcatctggattgttgttatagcaagcctcttttacacaatgacgtaaatggccttgcaaaatcattaaatctgctttttttattaaagattgaactgccatcaattgatttgcaacatctatgcaatatctatcatcttcaatcatttttattattccttctatttgacccttcgctgtttttaaagattgtaatgctttttttctttcctcactcatttcttcctcccctccccctgtgtaggggggtcttattaatttcattatatattaataaattattttgtcaatatcatttctaatatattcttacgattatcttgctcttctatctattcttatactcaccttgaatactcatttttttattctaggcacttaactccacgttcccctaatgccgtgataagataaaatgctggctttaacgtagaatttgctaaaaaaataagctccatataacaatgaagcttatttctataaatatctatttatattcaattatagggctttctttaactttcataatttctccgatatgaaaatttagaatttcatggccatttaaatttggaataataagcattgttatatcttctattcccttttcttttaggagttctttatcgaattctaaaagtaactcgcctttttttacgtatttttcttcttcacaatacaaattaaagccttcacctttcaaatttacagtgtcaagtcccacgtgaattagaatttctactccatcctctgttcttattcctattgcatgcttgctttccttcattattgtaacaatagtcccatcacatggtgaaaatattttattactacttggtttaatagcaataccttcgcccatcattttctgagaaaacacttcatctttaacttcacttatatctacgctaactccatctgtaaaagcatataataatttatttttatttctttttaatatatttttaaacattctctatcctacttcaattctggccaatattctttattagcttcaatcatatcatctagaatctgttttgctacaaatgcagatggaattgttttgttcatagtaaatgccataagtgctttttcatatgagccttcaatagcagcctcaactacaagtttttctgatgcttcttgttgttcaattattcctttatagaaagttggtatttctcctacacgtactggttctggtccatctttagttatatatgcaggtacttctaccatggcatcgtcaggtaagttttttattgccccattattttctaccataactaagtgtctctttcttaaatcaaaagctaagctcatagcaacttcaacaataaattctccatgcactccagtaaagaattgtgtaagatcaatttgccctgtagcattatattgatctacagcatcaaatatcttcttctctcttccttccattacttcattagctctagtatgatttttatctgcttcttttacaatactatctcctaaaagataatattgcatatacgtatttggaagatatttagggaacatttgcattatatgtttagcattatcgaatgtatgaagccatgatgcatcattatgtcttacttcactccttgaatccggtggaatataaccatgttcctttacatatgcttttaactcctcagttttatcttcaccactaactctaatttttgtaaaccatccaaagtgatttaatccaaaataatctgcttctatatcatgtctatcacaatctaagatattagccatatttctcataattgcaactggcatatcacatatatttaaaatccttgcatttggtcttaacttatacatagcttttgctacaatggctgctggattagaataattaacaatccaataatttttatttgcatatttttcacaaaaatctatcatttcaaccataggatatattgttcttaatccatatgctaatcctccaggaccacatgtttcttgaccaaccacatcatattttagtggaattttttcgtcttgttctctcatcttatataatccaacacgcatttgagcaaaaacaaaatctgcatctttaaatccttcttctggatcagttgtaagaacaagcttcacctctggatcaaacatttctactactttctttactatcactcctactttattttgacgttctgcatttatatcatataatcttaattccgatatcttaaattcctctttctttgaaagtaaactctttacgatccctggtgtatatgtgcttcccccgcctactattactaatttaaattttttcattttaataattcctccttcattttattctgctctgtctaatgcttcatctactattgttctaattttattaattgaaaggccatatacaacttgtatattatttccctttttcacaacacctgctgcgcctgttccttttaaagcttcttcatcaattaaggtgttatctataacatccactctaagtcttgaaaaacaattttctactgttactatatttgcttttccacctaatgctctaattattgttaatgctttttcatcatcgttattagctttactattatttttattttctgatttcatatcttgcttaacttttgctgcattctcatttaaatcaattacagcatctgtatcattctcttctcttccaggtgttcttaaattcatcttctcaatcataaatttgaatactaagaaaatcacaactatttcaactaatcctactagtatatatacaggccaatgagttttgcctatacctgctggcaagtttattactaaaaaatctaatattccattagttgcacatactcttacatttaataggtatacaaacatttggaataatccatcaatcactgaataaacaaaccatagtaatggtgcagcaaaaataaatgtaaattctaatggttctgtgatacctgcgattactgctgttaaagttgatggtattaattgtgcctttaaattactacgctttgcttttttagcagtgaagtaaaatgctaaggcaactccaattacaccaaaggttttaactaatccatatgttaaaaatcttgctgaatcaggcatgatagaaattgttgaatcattaagcaatgctaagaaaactggttttgctccaattacattttgaccatttattatcatctgatcaccaactgctgaatataggaatggagaccaaattaaatgatgtaagcctgttggaactaagaatctatttaaaaatccataaacaaatactccagctgcccctgcagaactcataaatccagtaagagctgtgattccagcagctattgtaggccatacatatgtagtaccaatacttaatatagctactacaggaatcatgataacgaatacaaacttactattaccatatggagccatagcgccactaaattctttatctatatatttgttgtgaactatagcaactagtactcctagaatcattcctagaaacactcccatatctgtcacatggaatcctaattggattgtctgccctgttccatataaagctgatgctgtatcgcctttaattatttttccagatagctctaaccacttactattcgcgcctaggaacaaaatatatgacataatggaaatgaatgctgcttccgcttttttcttctttgacatccccatcgctattccgacacaaaacaaaatgcttaagttccccataatcggtgataacattccattaaagaattttcctgttacccaaattgctccgccttcttttacaaatgttgtattggtgaaaactgctgttaatgcaatcaacatacctacaatgggtaagaataagaccggtccaatcatagctttggcaaatttctgcatactatttaaaatcttatctttcatttaaatattccccttcactattttataattttctttgggtaattacctgtgagaataggatatcattattaatagatattgttaatagttttaaacgtttcagcaacatgttgactcaaaagtaaacatgtttacctttacactttaaaaaagctatctcattagttaacatcgagatagctttctatatataatttcagtaagtttccacatgggtatgattagtttggatatctatattttataaattactcattaccttatctagcaaatattccattacaatcattaccctagcataaaaatagttcgcggtaagatttctatcatctaattctttatcatctaatatcataaaatttaaggttgcctttttagccatgtgattctctgacttaccagtaaaagttataatatccaattcattttttgatgcataatcaatcacttttgttatactttccgtttctccacttttagatattccaataactaaggcgcctcctatttgattgctgtcatatactccataagaatttgttttaatgcatttaaacccaagcactaacatctttctccaaaagaaatctgcaatcgaatcagagaatccagtggctgttatgaaaattatatcttctctatgtttaattatcatagaaatgaaatcttctattttcttattttcaatttctgatatgaagctagtaatatcagaggtatgttcttgattgttttgatgattttttactatgaagtttagtcgatatatcatatcgacatagcctgtataacctagcttctttgatagctttattattgttgccgccgatgtataattaattgttgcaacatctcttacacctttagttaaaacagaatcaatattagtcaatatgtattgcaaaacctgtctctctgtttctgagagcttgtaattatcagctattttataaatatcaaatttcatatcacacctccaatataatgtaattacttcatatgatatcatacttatatctttattacttaatgaatacataaaaaaatcccttaacgtagggattgtaatcaaaaattgcagctttcattaagttaattatatctcacatcatgaatatcttctctcttattataaattcccaatagattttattattcctcagtttcttctaagtattctataaatgccttaactataattggatcaaattgcttccctgaacatctttttaattcttcgattgcttcttctttattcaagcatctcttataaataccattgttagtcatagcatcatatgaatccgcaacactaacaattctagatactagcggtattttctcgccctctaatttaagcggatagccatttccatcccatctttcatggtgagctaagacaccttttgctacattatctaattgatttgatgcttttactattctatatcctttttctgtatgagttttaactacctcgaactcatcttctgttagctcacccttcttaagtaatatttcttcatttattcctattttccctatatcatgaagcttagcaactattgttagctcatccattaccgacattggaagcgataacttttctcctatcgcaatagaattttctaatactctatctgtatgttcttcagtttccaaactcttagcttctaaacccatttgcagagaatacattatagaactattaagactggttttttgtagcaacttttgcctatataccttatcatctgcttcttttaatgcttgatatatactcttattcaagctatccgctactgatgcacctaaagatatgctcacattgattaaatcgtgcttatacattttgcaacgatcaaatatatttttaataatgatttcacattcctgttcagttgtatttttacttaaaattacgaattcatctccaccagttctgaaaatcaactgtttttcaccacatacatctttaagtgcttgggctattaatcttaaaagttcatcgccttgatcatgacctagcgtatcatttactaattttagtccattggcatcccccattattactcctaccggaagatactcttcaccttggaactctttcactttttcttcaaaatatgttctattgtataaacctgttaaaatatcagtaaaacttaattgccttaattttttctctgcttcttttttctcagttatatctaatactaatcctacaacacctgaaacatcaccattcttatcgattacaggtacttttactgcttctgtatatatttcctctccatcttctgagtaaagtattgtttcagcttttatacttcttttattttttattacttcattatcttctcttgaatattttgcagccaattcttccgttggatgtatatcaatatttgtctttccaactacttctcctataccatccttattatagaattcatcaaattgcttatttacatatacatatctgccttctttatctttaaaaaatactcttcctggaagtgtatccattacaacttttaatatgttttcttgtttctctataatcttatctttttcttttataatatctaaatttgcatatatgccagctacagcaaatacttttccctcatcaattagcggaactatagtaatttttctgcgctttccatcaaggtacccttcttcagttaatggctttaaggagtttataacttgattgcaatatttaatacattcctctcttacaacaccatcaaatatctctgcatcattttttccaataaattctttatttatatctttatatatagctttgtattctttatttacatatataaatctcaattcaaggtcttttatccatataggctgtggaagattatctgctaatgatttaaatagcttgtactccatctcctcattttccctcctttgaattccaatctgccgtaataattctcagaaatgattcatcataataatctctaataaactatttggagcatttatgcaactatttcctcaaattttactaattacaaccaacttatcacactttgtaatttctttcaatcattgcaatcatttgttagggacttatttttaaaattgaaattcaatttctttattaaacttaatcactagtaatgtagctttaaaacttttaattctttactatattacaaaataaatatttaaattaagtacctttatctacttaatcttatgtttatatttcttatctattatctcttttaaagcaccttctgccagttgtgcaaaatatttcgagctatttaaaattgccttctcatcaactttatattccgggtgatggtgcgcataagattttcctgttcctacaattataaatgcacctggtatttttctttgataatacgcaaaatcttcaccctctagacccatagatattcttctaacatcatatccagatcgttttccaattttagtgctaaactctacccattcttcagtattatttgttgccggagaacctgaatgccaaataagctctgcacttccaccaaaagattgtgctattcctgataccatttcattcattctcttagctattaattgacgtatattctcatctaatgttcttactgtgccttcaagatatgctgattctggaattacattccaagtatttcctccttctatatgagtcacacttaatagcgctttttctgttggacctatattacgactgataattgtttgaagtgatgtaactatgttactggcaattataattggatctattcctttttccggcttagcagcatggctaccaatccctgcaatatttatttcaaacctatcgacagcagctgtcattgctccagtttttattcccattattccaacttctgaatctgaaacattgtgtattccaaaaattgcatccacatcatctaaaacacctgtctctaaaatttttttagctccatccgcactttcttcacccggctgaaatataaattttactgttcctattaatgacccttgatgctttttaactaaatatgctgcacctaaaatcaccgccatatgaaaatcatgaccacaagcatgcatcataccatcaactttagacttataacagagacttgtctcttctttgattggtaatgcatctatatcacatctgatagcgacgacaggaccattaggatttccttttacctgtgctacaaggcctgtatccaaaggtaaatcaagaatatctatatctgctctttttagcaaatcttttatcagttgtgtagttttatattcctcattagacaattcaggattctcatgtagtttgcgatatacttctataagctcatcatttaaattctctattatagataacaatattttatttgtcatattaatcccccttttaattcataaaatagaatttgtatcaatgcagtatatatactgcctagaattatattattctttaatgatgcaatatgacttactaacttctgcatgatattagatagacagataaaataatgttttacaacatacctactatgccttaattgatgcttaaattataggcatccattttcatagtgtcaatatacaatttcgacttctatccacactaatatctttagtttaagacataatatttatcactccataaaacaaccttttgccctttataatagatcactttgctaaattagttgctgccatagttacaacaataaatattatatagaatactatataagccctcgaccacgctccactaaaagaatatcgtactttctggtgagtctttaatattcttgtatcctcttttactatttctaaaaattcgcttttatacttactaataaatagcaataatgcagctaccccaactaaaaagtacaaagttccaaatgtatactccaatataggcatctttaataaagatattcctgttgtagcaaaagttatcgtattattaaatatatgagctatcatcgacggtataatagattttgatttaattgcaataaatgctaaaacaattcccataagtattggattgatgaattgaactaggtttagatgaaacatggaaaaaagaattgacgaaacaatcattgctgttagattcccatacttctgcatacttctgagtataaatcccctaaatataatttcttctaaaattggtcccactaaacatacatatattaaaaataatattaaaaaagtgttttgtttagggaaactaaaatctggctgtggaatgtttaatcctaaaatcttaaaaattgttgagtatatcatatataccatgcttgaaatcattcctacccctatacaagaagttgctcctaataatacaaacattttatttgacttattctttgaaaatatttcttgcctaaatttcacctttatagtttttattgctattagaattgctataagatccccaactatacatgtaaaatatccagcaaaaaaattatatgcgtcacttgaaagtcctaaaattatattttcctttagattagttactacattgaatcctatcattggtcctataaattttatagaaaatgtcattatgaacactaatccatatgttgataatactaacgcaagaagtatccttgcacagtttccgccactttttttaatatcattttttaatgcgagctttctatattcaatttcttcttgaaaatcatttatcatagctttacctaccattcattactttaatgttaaatagaattacaattacttatagccttatataaatcttctcttctatccttctttatatcaaactgttctttaatcgctcttatcatatctatttttaactcttttataattagtgtttctttctcaattacctcgttcaatatattaccatctggacttataaaaactgattttccattataatgaagatcatttccaattcctactctatttatccctattatatagcattggttttctatagccctagctttcaataaagttatccaatgcttctctctttctttaggccaattagccgctatagttattatttgcgcttctttagatgctatttgaaatatttctggaaaccttagatcatagcaaataaatggaactatttttaatccatcaatctcacatgtgagtatcttatctcctttatgatatttatcagcctcaccactgtaggaaaatggatgtattttcgtatatttagttaagcatttaccttctcttgacataataatatatttattgctccccattttatcactttttaccgcaacaccaattcctatatttatattattatccttagcctttttttcaatccatttgattatttcatcttcagataatacaagcttgtttatattcatggtaaaacccgttaaagccatctcaggaaataggattaaatcaaccttatttttcgaagctctttcaatgaattcttcaactttcttcatgtttttattaatattctcccagattatatccatctgtgcaattcctataatcaagttgtacctccttcaatattataaataaaggatactatgtgcattgttacatcagagtaccctttactttaggtcgcctatatctaattaccagtcgtggttaaaaattctttccattccatccccaatttgcaacttcctcatacttgacatatatcttatcttgatgtatgtctaattccttttcatatatgttacaaatttctgctgttaaagcatcatatgcatccttacttgattttccaaatatttttacttctataaatgcacccttttctaatttttctcctccgaaatataatgagtaatcatcttcgaagcctaccatcaaaaaggtttcactttttcctggaatcaattttattgcttcccctaattttttctttattatttcctctttttcctttgaaattttcacactaacttttgatcctataaatggcatctcttgttatctcctttctacatatacatatataaatatactaaattataccataattctatatatttgattattatttgcaagtacatacttaatttatatcataatttttaatatcacattcagttttattactccgataaataccacattaaaaattgattacttagttttaattatatcatatcttgtactagaccttgccaccatgtttgattctcctttcttaagttttataagaatactatattaacttatgaatactataaatattctaatctcttatcttctaaatatagtatgtatatattttaaatatgtaatttattccttttgtatatattcatcacttctcttattttttatttgttgaacttcatttgttaatctcataattattttaatattagctactgaaataattataagaaaaaactaaaatttggttaaacttttttctaaaatatgttatattattcatagtaggtattaattttgtaagtatttaggtgttgacttttaagtttttttgagaggggattaaattatgaatgtcgataaatcaatgtcaaaaattttgatagttgatgataatattgctaatgttttactacttgaaagaatgcttaacatatctggttataagaatataaaaacattaacagattctagagaaattttaagattatattctacatataaacctaatttgatactattagactttaggatgccatttgttgatggacttcaaattatagatgaactaaatcttataaaggatgataataaactatctataattatgatctctgctgaaaacgataaggaatactatgataaagcgttggctaaaggtgctgctgatttcattactaaaccatttaattatgatgatataatttccaaaatcacgagtaccttacagtgtttatgattactaggcataatgggtgaggtgatattatgaataaagcaaatactcataaaaatttttctctttataaatggatttggcagtcctatattcgtaatgcattaattccattaataattattgaaataatttttatttgtatatatttcatctcaaattactggtctcataaaagttcggttgccttttacaaagatcaatcaaaaagtgaacttaataaaattattaaacaagaggttaacttaattgatcagcacttatcatctatttcaaattctacaatgtttttcagtttgcaaatgggacatgctttatcaactacagtttctttaactcctacagaatatagtaggttatcatattcaaatgataatatttattatactaaagagaacaattcagctgatgaggcagcaattttttataataattttctacctgctacaagagatgataaagaaaagaaaatagccaaggtattaacacaacaaaaattaatggcagatattaagaattcttgtccattagttaattccatatattttaatacctttgattccttaaatataacttacccatacgttgatgtttttaatagctataattattctctacaaataccttctagcaaattttattatgaagctgatgctaatcataatccagatcaaaaagtaaaatgggtggctcatgattttaattcaagtaacaacaattttataagttctgctatatgtcctgtttataacggcaatttcttagaaggtgttgtaggcattgatataaatatggattcaattgtcaataaggttttagaaattgatattccttggaatggttataacttattgattggaaaagatggtaatattctttcactttctgatgttggaaaaagtgatttgaatttagatcaactcgttttaaaatatggaaacgggtattatcagtataacttgtataacaataatgatttatccacattaatggatgaaattcaaactagcgaaactggattttcaaatttcacactaaaagaagaacctagaattgcatgttggtctgctatccctaatacagatttaaaattattaatagttgttccaacaaaaaatatatactctaatgctgatatgctaagaaataatttattgaaaattggaatcattacaatattaggattaattttatcgtatcttttatttttcttaattacttataagaaagtaaaaaatatgagccatattgtttctggctctctgctaaatattaataatattgttcaggagattagtagtggtaaatatgatatagctgatccactattaaagatctcagaattagaagatatagcattaaatttgatagaaatgggacatcatattggtgaaacaaataaaaatttattagttacccaatctgaactcagaaaaaaagaagttgatttcaggtcacttgttgattcaattaatgacataatctcagagatagatataaacggttatatcactaagttatggtccagcgtccatacttatttgtataaactacatatgcacggtcatcttaattctatctatgatattttagatgaaagtacagctaaaattgctaaagagaagatacattatgtcattaaatcaagaaaatctactactatggattttaatatccaatccaaagatggattaaaatggtttgaggcatgtatctctcctcatctaaactataaagatagagtagtagttctaactcgtgatattacagaacaaaagaaaatggctcgttctattattactgcaaaagaagaggctgaaaaagctagtaaagcaaaatccgaatttttatctagcatgagtcatgagcttagaacaccattaaatgctatattaggattttctcaaattttagaattagaccctgaatctccattaaatccttctcagagtcagagtgttaaggaaatatccaaagctggcagtcacttactggagttgattaacgaaatattagatttagcaaaaatcgaatcaggaaaacttagcatttcaattgaatctgttccgattaaacatgtaatagaagaggctatttccataataaaaccatttgcggataaacataaaataaaaattattaattatcctatagataattcagatgaatttgtttcggctgaccatacacgattaaaacaaattttgctcaatttgctatctaacgcaattaagtacaacaaaaaagatggccaagtaatcttttatcatgataaggttaatgataagtatagatttcatgttattgacactggaattggcttatccaattctgatttagaattgattttcaaaccattttatcgtctaaacagaattaataattcaattgagggtactggtattgggcttgcagtcgctaaacaactgactgaattaatgaatggtgaaatatttgtaactagcgaaaaaggtgctggcagtcacttttggattgaacttccttgcatcgaatcatctattttgcaaacttctgaaaatatgatgacatctgaaaatagaacttatttccctaacgataaatttcgtacaatattatatgctgaagataatcctgctaatttacgacttgttgaacgtgctctatcccaaattagtaatttaaaaatgctttcagcaaattctggcgagctgtgtttagatttagccattgcccataagccagatattatattactagatataaatttacctggaatagacggttatgaagtcttcaaaagactcaaaatgcataaagagactaaagatattccaatcatagctgttagtgcccatgcaatgcctagagatatagaaaaaggattatcattaggattttctgattatattactaaaccaattgatattccaaactttatcgaaaaggtgtgcatcatattagctaaaattaacaaagaagacatcgattaataagacataatactatatttaagaaagaggcgttatctaatttatgaattatgacaaagattatgacataattggtttttcaaatgatttaggacttaatcttcaacaggtatctgagctttatgccgaattgattaatgaatttaatatagcattatcagatttaaaggcctccatgatggaaagtgatttagaaaatattcaaaaaataattcataacttgaaggggctttccggaaattatagaataactgatgtctatgaggaaactacccaaattaataatttattgaaaaatagcaattataataatatccaaccgcatttaagtaatatacttactgtcatctccatagccttaaaaaaaatcagaagcttcttttatgagatgtctataatcatataactatataataaaaaagacagcactaaagaattattatttaaactaaacctatgaaatatctcttttctgagtgtctatttcataggttttattttaattcttagtactatctttttaaattatcatctaatttctacgactacttattagaaattctcctaaatctttatctgcgtttagcatatgttttctacaccatttaaatattttttgctgcatatgtataataaataatgttgatatttctctagtttctaagaagcttcttatgtcccttaagcactctttgaattcttcatgctgcatctgctgaatctctaatcctggataattattttccttttgaattgcttcttcttcattaatatgacgaattgcatgttcttcaagagaatccaacgccttaataatctctaccttgcttttttcttcattcatagcacttaccaaattattaattaatctaaataattcttgatgctgtctatcgatattatcaactccagtggataacacagcatcccaatttgaattcataaaatgcataagtacctcaccactaatattgattctgctaatatccataataaccgaatcattatcttcatgagtaaactttaccattgatgacgctattttattatttattaatcctctttcatcctttttcaatacttcatacatatttcatacaccctctcataatttatacttctataccaaaatatcattatctatatataatcctcaccctaagattttaaatgtttagcataattaatctacacaaatatattcattaacaatttcttctggtaattctctgtaatcaaatggtgatatatcatcaatttcaaatttgactaactccataacctttattaataccctatccatttttactagaaattcttccttttcttctgccttaataacaaaactattgaatggaacattatatttatttacaaacttcaaatttaaatttacaacccaacttctcatatatgtatcccccttatccaaaatatcttaatattatttagaattttctattaaaaattttcctaaatccttatctagatctcgtatatgactcttccaccaagttgacattctattttgtacctttatcacaaataatgcagatgttccagtagtttcaaatgtccttctcaattctttaagttcttctttaaactcttcatgctgtttatgttgaatgctatatttaggataattatttttcttttgaatttcttcttcctcagtaaaatgctttataacataatcttcaaggaagtttaaagttcctataacctcatccttaccctttccttctttcatggcaatcaatagtttattaatacgatcaaatagttctttgtgttgattgtcgatatttacaatccccgttgctaaattattgtcccaatttaaattcataataaaacaccctctcataaattacttttaataagttgctttctttatataaagatatcttctgtacgaatacaatttaaaacacccttgcctataccagatatttatataatttaaattattttttatcatctatatctaaatttaatttcttcataacttcgattaatttatcagtatttattggcttagttacatacacttcacaccctagttcaaaagcattttggacatcttttgcattatctaaggccgtaatcacaaactttttagacaaattttcataggttatttgtttttctttctcaattgaattaatcatcttcagtgcttttaacccatctaactttggcatcattatgtcaagacatacaacatcatatggatctttctcctccactgaaaacataaatgcctggacagcttcctctccgttaactaccatatcgcaatcaccatattgtgaaaaaaacttaaataaaaaccgtctatttacataatcatcttccgcaataagaattctcatataccaacctcttttccacccaaattttatatatgcattagactaataatgcgttctctcaattgctcaaaagtcacttttactttttcctcatttccccttcgtgcatttgctttcaacttaaatcccatcatcactagttcatcaaatttagaaataactatagagttatttataatctctgctatcttttcaattttgattagattattatttgcctcgtccattttttcaactaatcttcttaattctgtgtttaaatctgtgcttctatttatttcattcgaattttcgaaatttcttttctcttgtaattcatatgaattaatattcacttttcctctctttactagtctgaaagccgctgtaaaactaaaggtgcttcctagtcccatatgactttcaacgcaaatccctccccctaatatttcaaccaattgttttgacaatgcaagtcctaatccagttccattatattcacgggaataagaattatttaattgactaaaacttttaaataataaattcttatcttcttcattaattcctatcccggtatctttaactaaaaaccttaaaataatcttttctcctattatttgctcagccttaattattaatgaaattcttcctccatctgtgaattttattgcattacttatcaaattgttaagtatttgttgtaacttttcagaatctccatacaataaatccggaatttcatctgaatcattatattctaaagtaattcctttttttcttacatcgtatgaatagattttaagtgtgttatgtattagatttttaagattaaaattcgattccctcaattccatttttcctgcttctgattttgaaaaattcagtatcgcattcacaatattaatcaatgaataagcactatcttttgcaattagaagattttctctcaattcatcttttaactcactattcattaatgtaagctcaatcatccctataacaccattaagtggcgtccttatctcatgactcatatttgcaaggaaattactttttgctttatttgctgcttctgcttcttcctttgagcttataagaagatttctcatctcttcctctactctttttctctcaactctttcatgcaaatccttaagttctctttttacgaccattccaagacgtgccattttatccttcatgatataatccttgcatccagcacgcatggcttcaacagctgtctcctccccaatttcacctgatactataataaatggtatatctaactttgtttcatttaatattttcaatgcttcaatagaattaaaatttggcattacatgatcagataaaattatgtcccactccttacaatttaacgcctttcttaaatcttctgcattttctatttgctcatagtctacattgaaaccacttcttttaagttgtgctacctcaaaattcaaagaggcttttgaatcttctattatcaaaactctaatatcatttatcataggcttcactccatggcactaattttaaatcattcatatttttacatcatatcaaaatctatgtttttaattgaattatttactaaacagcttttagtttcccttaatttaaattttgaaacttgatctttcaacatctctgcttgagatgccaactcttcgcttgcagatgcactttcttctgctgtcgctgaattagtttgcactactgctgatatctgaataactccttgattaatttgagatattccttctgcctgttcatttgaagctactgctatttgatttatgaattcagcaaccttcacagtatcttctacaattttatttagtgcttcagatgtctgttttgctatcttagttcccatttctgcctttctaatagcgccctcaatcatctctgcagtttcctttgcagcttttgcagatcttgctgccaggtttctaacttcctctgcaaccactgcaaaaccttttccatgctgtccagcccttgccgcttcaaccgccgcatttaaagctaaaatattagtttgaaatgcaatttcatcaataacttttataatcttatatatacttgttgaagcattatttatatcttctaccgctattttcattgctttcatttgctcatagccttcttgagcatttatttttgcactaacagcaatttcattagcatttgtggagttctctgcattcatttttgtttgggcagatatctcttcaatagatgctgttaattcttcaatggagctagcctgttccatagccccttctgaaagtgctacacttgaatcagaaacttgttttgcccctgctgaaacttgttctgttgctgaatttatattgcagatagtattatttaatttttcagccattcttctaaaagaaagagccaataatccgatctcatctttgctctctatattaacacttatattgaagtctccatctgcaattttatctgctattcttattatcttattaactggtctacttatagataaagagataaatactcctgttagtattgataaaatcactcctataattaagattattgctgttaataatgttgtgttatctgctgttttactattaccatccgaagtttctttagctatctttagttttaaatctgtatatgtttttaaatttgactgtaacttttctagaataggctttccttctgaatataaattattaattgcttcttgatttctattttgattctttagttgagttattttgcttataagattcatatattctgatttagaaacctttatatcctcaatagctttttttccttcaatagtcaatgttgtctctgacaatttatttaagctataatcaaacttatcgctattgtccttaatttgactaatataatcttgaatttctcctgtattatctgaaagcaaaatatctctagtattagctcttatattattaaaatcattcgaaacctcaataacatctcccaatggttgagtcattttattatataatttagtatctaggtcattaattttatttatatttgaaatacaataaatacccgtaatgcctgcaataaaggctgcaaataaaaatcccaaaagtattttcaaacctatcttcatgtttttgaaccatttcataataatgtcctccctctattgttcaatgttatttagggtttcagcatcctcatcatttattaacttattacaatctaaaattaatttaacttgattatctatttttcctattccctttatatacttattgctaaccttgcttagattaggtggcggtacaatatcttggtctggtattatcagaacctcagaaacgctatcaacaataagacctattgataaatcattaatatctattactattatacaagttctatcattatactccctaaaatccttcttaaatcttaatctcacatccattacaggaattatctttcctcttaaattaataattcctcttatataatctggaagttctggaactaaagttataggttgtattccaataatctctgtgacattattaattcctataccataagattcatcatcaagtataaatgtaaggtatttgcccttctgagtatcttcttccatatctgcattatcattaattatatttgtattcatgctaacacttcctctcttctactagaaatcaatactaatactttccaaactctgtgtcatctaaattaatactaattttttttcttatgttagatacttgtccaaatcttctctcatctatggcattttctagccttgatgcttccttttcttctatgctgtctaaaaatattttatttgcacttctcttttttaaattgaattgagcaaccctttgtttcaaagtttctgcctgactagacatttcttcactcgaagaggcagtttcttcggatgtcgcagaatttatctgagtaactctcgatatttgttcaatcgcttcatttatttgtgatactgcagttgcctgttcgttagaagatgctgctatttttcttactatctcagaagtgctactaatatcgttaactattgaatttagtgattctgctgtattgttagctatttgagttcccgaattcacttttcttattgatccttctatcaaagcggttgtttctttagctgcatttgcacttctacctgcaagatttctaacctcctcagcaactaccgcaaatcccttcccatgctgtcctgcccttgcggcttctaccgctgcgttaagagctaatatattagtttggaaagctatttcatctataacttttattattttagaaatattttcagatgcttcattaatctcattcatagcctttagcatagtattcatttctgtatttccattaatagcattcgttgttgcttttgtagccagctcattagcttcattagcacttatagcatttaattttgtttgttctcctatctctgaaagcgaagcagttacttcctccacggcacttgcttgttccgcagatgcttgcgataggttttggcttgcatttgagacttgtactgatgccgaagccacctcatttgctgatatatttatatcagtaagtacttgattaatttcttgtacagataaatttaaagcgttcattatatttccataatcacctttataagaattctcaatgcgaacattgagattaccttttgacatctcttctaaaacattttttatttctcctattggcttagcaaaagcatcaacagctttgtttattatacttatgagttctttaaagctacctgtatatttttcactttcacctctaatctctaaatttccttcagccgctgctgaaagaaccattatttgttcatcaagaactttaagaatattagattttaatccatgcagactttcatttgcaattccgtatcttccaggcaatttttcaagctcaactgagaaatctccttctgaataagattttaatactgcaaatatctttattaatacatcaatagatatccacattccatcattaacgctttgagccatttgcctatataccccatcgaattttgaaacatctattctatctcttgtattacctaatttaaatgtatcattcatccaattgacttctttaacaaataaatttaacgtatcaattaatgtattcaaattgttctttattttattaaattcaccttggtactcatttttaatcttttctggtacatccccattgcttatccttttcacataatcagctgtaatattaataggttcaacaaacgcatcaattacatcattaattccatcaatcattttagcccatgatccattaaacttggatgaatctatcctttttgctaaatttcctgatttaatttcattggctatgttaatctgttccttagatatatttaataaattatttcttaagtcctctatatgctcatttactaatccataccttcctgggaatttttcaagctcaactgtaaaatctccttttgaatatgatttaagcactgcaaataacttaataaatacttctatcgatatccatgtagtatcattaatacattccaccatttctttataagaaccttgaaattttgtagcatctattttatctcttgtattccctaatctaaaactttctttgaaccaatgaatattctccatcagattattgagattatctataagttgattaatacttgtttttattacatcaaatgatcctatttcctccctagtgtatttctcactaaattctcccttacttatcttttctatgtaatgtgaagttgctctaatattctttataaacatattcattgttgctaaactcttcctatgtacatttccccatgcccctgagtattttgataaatctaaagctatatcaaaattaccttttttaatgcaatcttcaattaaattagaatcatcgatcaaattatttatatttttttgtatctgtttaagtgaattagctagatccccgaattcatcaataaaatctatctgtatatcttcgtcaaattctccgttagcaattttccttgcaatattattaatttttcttatatgtttgtagatgaaatttattagtaataatcccatgattactgtgattattatagaaaacagtaatattattatcatattaattcgcatttcttttatatctgccacgtttcccactccgatattaaatgcggcaaacaaagcaatttccatagctataatacctgtaaatattaacccaattttattttttattttcagattacttacctcaaacatcttaatccatcccatctaacaaaatttactcttatgatgttatcttaaatttcaagttaatttcctaatgctttcaattacatgcttatcttaaagttttattttctaatatttctttcaatatttaatagttgtttagatacaatgtcctccctgaaaggttttactataaaagatatagctcctgctagcatagcctccttaacttggatttcatgcgataatgacgaaattactataatctttgcattttcatctattgacttaatgatctttattgcttctattcccccaagttctggcatggtcaaatccattgtcacaatatctggttttaataaattatatagttttacggcctttataccagtatcagcttcacctatgatctcaaatccgcaattttgtaaaatagattttaaagcgagtctcataaattccgcatcatctactactaaaactcttttcatataatttcacccccatgaaatgctataaaaataccacttttcctttaattttattttaaatgtttttaaaattggtttgtagtaccacaagtcatgtagtatcatgcaaattgcacaattaatttgtataaatatgccgattgcatttttatttaaaatccacttcatatagatgacatttataaggattttcaccatcaatagtcccctaatatttacaattgcaatttaaaaattaaactaataaagtttacacacaaaattttattagtttaattaagattagctttatacattgttcatgtatttgtaaaatgttataatttatattagaatctacaagcggttaatctgtgttttcattagatttaataaatattatttgtctatttttcacgaaaatttaatatattgcttatttgggtaaagagagggttcgtatatgacaagagtaattattgcagaagaccagaaacttttacgagaaagttttaaaaacataattgaaaataacagtgatataaaagttgtagcttgcgctactaatggaaatgaagcttatgatctatgtaaagaatatatgcctgatgttgttttaatggatctgtctatgcctatatgtaatggtacggaagctacaaaactaataaaagcagaacttccatcagttaaggtactagttttaactgcatctaatgataaatctgatgtcacagatgctataagtaatggtgctgacggatatatcttaaaagatataagtactgaggaacttatactatctataaaaagcatatcactaggacttggcataattactaaagatatcttaagtcctatgatattaaatctgcgtaaagaaaataaaaaagctaagaaaaaaattattgatattaatggcataaatatctcattaactgaaagagaactaaaaatagtatctatgattgttgatggaaaagataataaagaaattgcatcatctttatttattgctgaaggtactgttaaaaatattattacagaaataatttcaaagcttagtttgagagatcgtactcaacttgcagtttatgctgtaaaaaatggactagtataaatagtccatttttattttaacatatcgcaaataacactaggtatatttgaaatagccacttgcttttcaacggctccaatttcaaaagcaacttttggcataccatatacaacagaggatttctgatcctgccctatagttcttgcccctgctcttcgcattgacataagccctactgctccatcatgccccattcctgttagaataactcctatagcattttttgacgccaccttagccacagattcgaaaagcacatctacagatggacaatgtccattaactttattaccttgaatagtttctacaatgtacttatccgcagccttcttaagtttcatatgttgatctcctggtgctatcaaaaccttacctggctcaatagtatctccagtctgagcttctttaacagtaaaatgcgtttgcaaattcaatctatctgcaaacatcttagaaaatactggtggtatatgttgtactataattatccccggaatatctttgggaagattttttaataggttatagatagcttctgttcctccagtagatgctcctatagcaatcactttatttctaacatttacgctcttttccattcccctattactaccactctttggaacttgccataaattagcagatagatttacatttaccgcgcctctaattttaattattaactcgttaataaaaatttcaaatccattaggagttctagcatcaggcttacttaaaaagtctactgctcctgcatccatagcatcgaagactacatcgcttatagaacttacaactattattggaattttatattgaggaagaagccttttaataaattctacaccatttaattttggcatttgtacatcacaaatcataacatcaggatttaattctaatagtttatctctagcatcatatggatctaccgcttttccaacaacttctatattgggtgccgttgatattcctctcgatattgcttccctaaatactatactgtcatcaactattaaaactctaattgatctcattaacttcaccttcttagccctttaaattatcttaagataaccctattcctttctatatacagatggcattatatacttaaacccagcggtatcaccacttagtgattccgaatgccctataaaaagatatccaccgtactccatgctgttataaaatttacggattagctcattctttgttctattatcaaaataaatcattacatttctacagaaaataacatggaactttttcttaaacggaaatacatcttccattaaattaaattttctatatataatttcatttttaatattctctgaaaatacgaaattttcatcatcgtatttttttaaataaatcttcttccacatctctggtaatggtgcgatttgttctttatgatatattccatttttagcaatgcttaataccttttcggatatatctgtggctagtatttttttatcccaccataacttttcttgtttaaagaattcgcttaatatcatggcaatggtatatgcctcttctccagaggaacatcctgctgaccatattcttaaatctttgtctcttactgaattaatcaaataaggaagtactttctccttcaagtagtcaaaatgtgttttctcacgcataaaatatgtatgatttgttgtaattttattgagcagtgtactaactgcctttccactcttatcagaaactacatattgataatattgagaaaaatcttctatattatgctctgctaacacattatggagccttccaattaccaacatttttttttcttccctgagattaatcccatagttctcttttatatagttggataattgagcaaattctttttccgtaattgaaatcatataatcaccttatctctaatattttccaaattcattatcgctaagtattatttttttagaatttgatacttttctatctaaatgtttatctcttgtttcccttaaatctcttgtgtttttgctaatatcatcatgaatactattgttcatatagctattgtccgagctagtcattgaacttctagcacttgctaatttaaacatttgaacttgttcctttaaaacttctgcctgtcctgctagttcctcacttgcagctgcgctttcttctgaagtcgctgaattactttgtacaacttgtgatatctgtattattccttgtgatatttgtgaaattcctgtagcttgttcttcagatgcatctgatataccattaattatttttgcaacctcttctatatcactaacaatactttcgagcgcatctgcagtttgatttgctatattggttccatcttggattttaacaattgattcctctattatttctgtagtttctttagctgcctttgcagatcttgctgctaagttcctaacttcttcagctaccacagtaaagcctttcccatattgacctgctctagcagcttctaccgcagcatttaaagcaagtatattggtttgaaatgcaatttcatcaatcaccttgataattcttgatatattattagaagagacattaatttcatccattgccttaagcattaatttcatttcattatttcttttccccgcatttgttttagtactatctgttataatattagcctttttagcattttcagcatttactgatatttgagaagatatttcttcgatagaagctgtcaattcttcaacagcacttgcttgctctgtagccccttgcgataaagctatagttgagtctgctatttgtctagatccaactgtaacttgctctgccgcaaatcctatctgaccaattacttcatttaatctatatttcattcttttcattgattctgataatattccaatttcatcttttgaatcattaataatctctacatctaagttccctttactaatttcacttgttacagtcataagcttcgctatagagttacttatagcttttgaaataataattccaagtgatatagctataattatagctactactattacaactatcatagtcacaacagcattattaacctctgcggaatactcatttgatttactaaagcctgctgattcctttaattggaacagattgtctacagaattatttatttggtcagatagtttttgcgttgaatcctgccctattaactcaagcgcttcatctctcttgcctgaaagagataactctataactttatcctttattgcatcatatctacttaaaagtgtattaagattagaaaactcagcttttgcttcatcactttgaagtgaaccttcaaacttttttaaactctcttgaatttttacatcgtaattttttatcctattaacataatcactcatgtctcttccatctctatacattgtaatattattcaaatttattttaagtctctgaaaagatatagatgcactagcaacatcagcaattgatgccccataatttgtatacaaattagtataattctgatctattttctttatttttgtaattcctataacaccaactattccagctaataaagctactactataaacccaattattaattttgctccaacctttatattgtttaaccacctcatattctttccctccattaaccacttattttaattaaacttaaatttttaatatctatactgttgtcattaatccatccatatcaattattaaacttatatttccatctcccaaaagagtacatccagctaaatccttaatatttctaatattccttatataatctgggagagctttaacaactacttgttgttgtcctaataactcatctactaaaatgcatacccacttttcatcctgctctatcattattagaattccatctgacaatttatctgtatcagttcttatagaaaaatgctcgtttaatctaagtataggatagcattgacctctaaccataataatctcattattatctggatcttttataatatcactttctttcggtctaaaaaattcttttatagagctagttggaagagtgtatctggaatttccaactcttacattcattccgtctataattgcaagagttaatggtatcttaatggtgatacttgtaccaaattccaacatactatctatactaaccgttccccctatcttttcaatattttttactacaacatccatccctactcctctgccactaaattctgatacagcttctttagtggagaatcccggtaaaaatatcaaattaaatatttcttttttactcatttcactttcatctttagtaagtaatccattgtttcttgctttttctaatatcttttcttcatttagaccctttccatcatcttttactataattaggacatcgctacctgcatttttagcctctaacaccaaatttcctacttgctgttttcctttatcaattctttcttctactgtctctattccatgatcaatagaattacgaactaaatgcattaaagggtctgatatatgttcaattatatttttatctacttctgtttcttcccctataatcgttaatttgacttccttatccattttcttgctcatatctctgactattctattcatcttttgaaaagttgcagaaagcggaaccatccttattgacattactgtatcctgcatttctgctataattttccgaagttgccttgctgatttttgaaaattatcaatttcaagtccaattaaatctggattttgtgtaaccattgattccgaaattactaactccccaataagatccataagcctatctgccttagctacacttagacttataaatccttgatgagaggatgttttttcagttttcttttcttcttccttcttactacattctttttctatcgcaacttcttcaacaacttctttattatctaaaaaggcgtcatcgtcttcccccattaagctaatatcaagtgcacttaaaaaaacagtttcattcagaattgtttttacatcctctagatttaaatctgaagaaaaatatattttaaacccattcttcctgatttcttcacaggctttttcatcatcgtctattatattttctggtgagctacatattatttcagctacttctgatagtttatgaagaataccaaaacaccttatgttctccattccacaatcttctgcaaactgaattttagctttatatttttgattagatacgtcccttttacttttagcgctggttataaaaaatttttgctgcttcaaattattttcattaggctttgtatcactatcaattgtttctgttcctttgagtttatttagaaaatcctttattccagtaattttatttgcgcaatctccatctggtgtatttccttgctgaattttagaaatttcgcctttgataaaatcaattgaatctaacacaatatcacttaatatattgttatcaacttcatctggcttgttttctctaatataataaaacaaatcttccacagaatgagagagtccagaaatgttattaaaaagcatcatagctgatgatcctttgactgtatgcataattctaaatatttcatctatcgaatttgaaaagccattttccttttctccatcaatgactaattgctctaattgttctataagctgggtcgtttcaaatatatacatatctaacatagattcatttataaagctttctgacattttaattccctccttttttacatattcattatataaaacgtcaatctctctatattctatattaagttttttattgcaatcttttaagtcacttaagtcattgattttgatgcaaaatgcactactatactacatataaatgcaaattgcacaaaatatcttgaaatttatataaaaagagcattcaatctctatggattaaatgctctgaattatctatatgtaaaatttcttattaatctcttagctcttatctagttaatttgatttctcctctgtaggtactgggtatttacgtaccacaaagatttctactcttctatttttagctcttccatcctctgttgcattagatgccttaggcatatgttctccataagcctgtattgatatcttctcctgattaatacctcctgtactaaccatataattcaacacatttatagcacgcatagcacttaaatcccaattggaacgaaacttcccattattaattggcacattatcagtataccctgcaactttgatttcattatctagcccataaagcatatgcgaaatttttagaagcaattgtgatacatcttttaatacatctgcttcacctgaattaaaaagtacaacatcttgtatagaaattgctaatccctcactattaagatcaactttaactttatcagaatagccttcttttttaatttcctcttctatcatttttttaacttcagtcattttgtcttcttcagccttattatcactaacaccagattcctccatagaaattgcagagttaccatcttgatgcataacaccagtccctccggcaaatatcatattaaattctttagccattgactgaaattttgctttatctgtttgtcccatggcaaacataacgataaatagtgctagcagaagtgttaacatgtctgaatatggaagaagccatgcttcatctacatgctcttcatgatgttgctttttcttactcatcacttttctccttttaactaattatcattattattttcttcaaatcttactctttgttttggttcaagcattcctactagctttctttcaatactctttggattattccctgcctgaatagctaaaattccttcaagcataatgttcatattttttatttcttcttgagattttctttttaacctatttgcaaatggatgccaaattaaatatccagtaaaaataccataaacagttgcaacaaaggctgattttatactttctccaagtttttcaatgtcattaagatttccaagagcacctattaatcctataacagctcctaaaactccaagcgttggtgctgtaccacctgctgttgtaaacgctgtagcaccaagacgatgtctctcttccatgctctcaatctctatttctagaacttcttttataagatctggttctaaaccgtcaaccaccatttctaatccctttttcataaacttattttctaagccttgtatagtactttcaagagataataatccatcccttctagttgtctgagacatctccacaagttgtgctataatttcagcaggatcttcttgccccttagcactaaaaagaacaccaaaaatcttaggaagcttagtgaactctccttttggaaaagaatttagcaaggctattacagtaccaccaatgattactagtatggcctctgcactcataagtacttgaaggcttgctcccttttctagcatggctgcaactacaattactaaccctccaataagaccaattactaaaaatatatccatgtttgtccccctttattgttcttcgcacgtcatatgattaaatgttatctttttattagtaatataacatataattacattttctgtcgtttttcttaatgatttggaatctacaacctataactataataccataatcttgaacaatcgaaaactatattttgacatattatataacataaattctatatattttgactatatggcatctttattttccattattcatttaatttgttaaacatgctaaatttaagttaaaatccatttatcagcgttatctttattgtcgaaatagaacttgctttctgttatatgaatacaaaaatgctgacttaatacatggattatttaaaaatctaaactaattttattcaatataaaacatttacaaaccttactaaacaaaaaagtagctattggagcacttcactaattcatcaaacactaattactaccccattataaattaatgtacaattcatctatggttaataatcacttcaagcaattaaaatcttttatatgaattgtacatctatttcttcatatttgataactaaagttcctagaaactatattttaaatttctctatggtctcttctaatttctttgctagtgtaagctgttcttttgcattaactgaaatattcttcatagaagagattgaattactcgaactattttctatgctgttagtgctctcagaagatctttgagacatttgggccatatgttgaaccgcatctgatacttgacttattacttcattaatttcctcagacatccttgctaattcggaggacatggaatttacgaagtctgcatccttataatactgctttcctatatgcgaaaattcctcaaactgtttatttacatccatatccataaactgtaaaagttcattactacttaaagataggtcattgaaagatttttctactttttcaataacttttttaacattctcaactgcttctgaagattgatctgcaagttttctaacctcttctgccactacagcaaatcctcttccttgttctcctgccctcgcagcttctattgcagcatttaatgataacaagtttatttgctcagctattgcagaaatagcattagccataatcccaatctcatgcactacctttccttcttcaatagctttaatgatcttttcttccttctcatgatatactttacttatagattgaattgccttattactactattctctacggtatttgcacgtgcttttatatttgtgacattacttgttccatccattgccttttcagataatatattaacagtcaagtttacttcttctacagatgcagatatctcctctgcaattgcgctattttcttgaacactcgtatttattttctttgtttcttcatttactgcaattaaattactacttatttcatttacagatatagtcaaattttcactggacgaatttacattatgtatattttcagttattgcacttataagttcacgtacattttgctgtgccttattcaaagtatctgctgtttgtccatattcatcatatctctttaaaactaaatcctctgaaaaatcgtaattcgaaagtctagttgctaaattctttattttaaataacacttttgatgaatctcttgatattgctattccaacaaacaaagttattaaaacagaaaaaattcccaacacaacaaattgaattttagtaaaatctatagattccttcatgttgacctgagtttcacttgctgctttttccattacatctgttatctgatttatatcctccctagattcagcaaactttttattaaactgttccttattttttacctctcctgtatctatatcaaaactatctaaccagccttgataattgctttgaaattcatcataaagttcaaacacatttttgttgctttcattatgtttaatatcttgtaaagatgccttaattggaagtaacatatttatagcattgcttgttctatcttttgcctgacctatgttatcttttaaatcttttatattcttattcttatcaggttcacttatgttcgtatcacttaaattattctgagcaacaagagcctgatacatatctctatctgcatttagtatgaggctatttaccttatataatttttcataatacatatctgttaatgtaccataagtatttgtgatttttagtattccttctatagacaaaaatataaccgcaatcaatggtattattaccatcaacatcaattttgttctaatctttaaattcttcaataaatcccctccctttaacaacaaatttcttattttttattttcaagttccttctatttttcaataataatattattgaaataaaatatagttattaaattctacacaatcttactaattcctttccatttttgtattctattttaaaaatttagtgtttataatcttatataaatttattaatcagctaattctttttaacattaatttataaaacaaaatagataagtttaaaggagttattgataaaatcaacaactcctttaagcttatctataaacttacatattttataattcttctccatttgtctttatgacattttcataccaataatagctatccttcttataacgattcattgaagcgccttcttcttcttcacgatctacgtaaatgaaaccatatcttttttgataaccattcaaccaacttaataaatctgttatagaccatgtacaatatgcaatcacttctgatccctcattaatagcttcttttaattcttctatatgtgccttcaagtacgctatacgatagtcatcatgaattttattatcctcagtctttttgtcaaatgcacctaatccattttcagaaataactattggtaaatcatatctacttgtaatagttctacagcacattcttatccccataggatctattgtccaatcccagtctgtagtttttaaatatgggtttggaggatttttaaataatccaggagttccactgacttgtgctgatcctttttttcctgttgtattcatttcagccattccaacgccatcaattgggttatactcaacaactgctgtttggtagtaattaactcccataaaatctacttgagctgctgccttcataagttccgcatccccatcttcaaatacaggtgctaccccttgaccttgtagatattttaatgcagcttttggatatcttccgtatgcataaacatccatccaccaaaatgattgtaaatcatcataatctgcttttgctatattatttactggattgcagtctattgcatagctaggtgaaaacgcaaagcttgcccctatcttaccatctggcactatttttctaaaagcaagcactgcttttgcatgagctaaatttgcatgatgatttacttgatagaacatctttaaatcattcttctttcctggtggatgcactgccattacccatccaagacttgtaaatatgttttgttcgtttaatgttatccaatactttactttatctttatagcgcttaaacaaagtaatagcataattctcataatcatcaattatgtttctactttcccaaccattatattcttcctgtaaagctataggtaaatcccaatgatatattgtaaccattggctctattccatattttagacattcatcaattacattgtcataaaattctaatcccttctcattaacttcaccttttcctttcggataaattcttggccaagatatagagaatctatatgtttttaatcccatttccgccattaatgcaatatcttctttatatcgatgataatgatcaacagctacatcaccatttgttcctttgaatgtttttcctgggattcttacaaactcatcccaattacttcttccttttccatcctcttctgcagccccttctacttggtatgcagcagatgcacttccccataaaaaatcatctggaaacccatgcttttctttaaaatacattcctttatcctcctaccaacaaactttctattatatctttattaaaattctttcaacaaaatactatccttattattaacgactacttacaactctagactaccacaaacttattgcacttgtccatataatttataacttttattttaaaatgtaatgtcatttacttaataatattattatttaatacgcttttataaaactctactatcctatatatgttgtgatagtaaatttacatttaagtctctggtaagctacaagctgcgttattaatataatttataagcttaatcgcaatatattaatttttcaaaatacaacttatggattttttaatataatccatttacttcaatataataaaataatcctatgcaaaattaataatacataatttcggcataggatctttatatttactacgacctagtagtttccctactattttcacgtgggtttttaaagctaggaggtgttggctcaggattgtcaaaataccttccaggagttgataagtcaaagtataatctagaatctttggttacaccaaaatctttatttgatgctctatcctgcaccttatttaatgcttctctaaatagtgcattgtgtgcttcctctctgtttaatagaaaatctattgtctcttttacgtatttatcattaatttgacgatataaatattcatatacaacctttgctctttgctcagctgctatatcagataataagtctgctgcaatgtctcctgtaacattaacataatctgcagtccaaggatgtcctgatgcattaataagtcctggtgcaagacctgtcaatacgtgagtttctatttctcctccaggagttttagtataatcaacttcatgtccatttagtaaatttatagtttgtgctaccatttccatatgacttaattcttcagctgcaatatctaaaaataaatcatgaatttcaggatcttttaccctaaaactttgtgaaaggtactgaagtgctgcctttagctcgccatttgcaccacctagctgttcttgcattaatacagcatattgtggatttggtctctctacttttacatctctaagtaatggtttttcgtgtttaaacattgtacttgcctccattcatctcagttaaaattatttacaaagttagtatttaataatccaatgcttattattcaaaactctaaatacataactgtaataaatttacatttagcattctagaacgttagctcttttaataaaattacactacaaaaactaaattacaaaatatataacgcttttctatttgatttaatttatattttttaatttattaaacaaaaatacctgcatctctgcaggtataaatttatatttttttatttgtggcttactaaaattaaaacatataatttttaaaacttcagaaatatgtttatctctaaattgttatcaactcatattccttactgcctaagcctaattccacagcatagtcaatagcaactttccaatctgtttctggactaacattagtaaagtgatcattgtgcttacaaccgctcttttcaagaaggctacctttcataactggctgcttatttactgcgtctgcacaggctacatctaatgctactggatcaaaggatgcaaacatacctacatctggaactatcggtacatcattttctgcatgacaatcacaatatggtgatacatcaattactaagctgatatgaaaatttggtcttccatttaatactgcccatgaatattcagctattttcttatttaaaatatcatttgattcatctgatgctggcataaccgcatccattggacaaattcctatgcaacgaccacatccaacacatttgctatgattgatgagtgcttttttgtctgttaaacttattgcactatgtgcacagtttttagcacacataccacagccaacacatttatcttcataaacgctaggttttccactactatgcatttccatttttcctgcgcgcgaaccgcatcccatacctatattttttaaagcgcctccaaaacctgttaactcatgtcctttaaaatgatttaatgagatgaatatatctgcatccataatcgcatgacctattttagcttcttttacatatttcccaccagtaactggaaccaaagcttcatcagttccttttaaaccatctccaattaatatatggcaacctgttgaaaacggactatatccattttcatatgctgaatttaaatgatctaacgcattctttctgcctcctacatatagagtattgcagtctgttaaaaatggatttcctcctaattccttaatagtatctaccacaactttagcaaaattagggcgcaaaaacgctacatttcctggctcgccgaaatggatcttaattgctgcatatttcttttcaaaatcaatttgatcaattcctgcactcttaattaaacgttttaacttttgtagcaaattttccttagctgttgcttgcatattagtaaaatatactttcgatttttccactttaagtccctccaaattatttataagctaatgtactaatttaattatagattttagagttaactctaagtcaatacatatggtaaaaaattctcctaaaatattttaaaatctagtaattaattctctttgttaatgaaaatttttgctataaataattagtataatatccttactaaaagcaaactgcatctcataaatatattgatttgcaaaatagtaaaagattaactagaataatattaataataattgaaaggattgcagtacatgaaaaaaagagaattcatagcgcaagatttgataagtaaaatatatcaacatcaatttcctaataatcaacttccaccacaaagaagtttagccgataagtatgaagtgtcgcgttatactattcaagaagctttgaaacgactaatggatatgggacttatttacactatccagggagatggaatttatataaaagaaaatattcttagcaatcccctaatttacaactcaatgactgaaaattcttacaaagacattgtatctaaaacaatttatttaaaaaaggtttccccctcattagatattcaaaagacctttggattagaagaaaatgacctagtttgggaatttcaacgacttcgtattgtaaagtatcaaattactcagttagaaacctccgtacttccatgctgtctctttccagatctaaccccaaaagatgttgaaggttctattcaagactatgttcaaaaaaaaagttatataatttctcactacataacaaattataaagcttcaattatttcaaagaatcagtcagaactactaaattgcaaaaaaggcactcctgcaatggaaattaccaatagaggaattctaagtgatggaacaatttatcaatatagcaatatcctagctttagattacacatgtacttacataatcccttttaacaaagaaaattatgaaaaaagacaaaaaagcatggggtattagccctcatgctttttatggtgtaacaattgtgccatctggtatacggctctgagtccattcatgtggacgatattcaactggatactttataatttcattttcatcaatatctactccaattccaggcgattcaataggataaaaaaatccattcttggcttctggtatacctgaaaatacacatctagtattatcatttatttcaatattttcttgaattgcagcattatgaagattaatatttaagtgaatattaaccgctactccaattggagttatatctgaaggtgtatgccatgctattctcacaccgaaagcagcacataaagatcctagcttcaacgctggtgtaataccaccaatttgtgaaacatggcaacgaataaagtccacttggcgatttgctattaatgatttccactccataggattattaaataattcaccagtagcaagaggagtcgatgtttgcgaccttatttgacctaaccattcattttgatcaggcggaagaatatcttcaataaagtatggtttgtatttttctacatcttttgcgaattgaacagcttggttaggaaaaagcctttcatgaacatcgtgtaaaatatgaaacttatatccatacttttcccttaaacttgaaaacatagaaactgtagttctcatgtactcatcttgatcaaaataacttccttgtgtaggattatctgtagtatgaaattcgctagaattaccaccataaaaccctagctgacatcgaatatgttggtatcctttttttctaatttcatcaatttcagtatataaatcttctaaattatctgctacagcatgcgtatatgcagcaattgcatctcgtgatttacctccaaaaagctgatataaaggcatattagctaattttcccttaatgtcccaaagagccatatcaacgcctgaaattgcattattcaaaataggaccgttacgccaataggaattaaccatcatcatttgccataaatcttcaatgttatttgcatctcttccaattaaaataggttttaggtattcagatactactaaacttactgcttttggtctctgctgaaatgtggcacatcctaagccgtaaatccctttatttgtttctacttttactactactaaattatgtctatctggtttagttatataacataaaacatctgtaattatcgtaggctccactccattaccttctttctaactttctaaaaagttttctttactaagattaaatcatgtctgcaatactaaagtcaatttggcttttaaaaaactcattttcttcttattttccagtccaattttatatatttagcgttatagtcattggtataactagtattacagaatttaatgccgcattttggtctacttttattttattttcttttatgatattattgccttgtaaacggcaacaacaataaccataggaggtattaatcaatatgaaaaaagaagatgtagtagccaagattataaaagaagttggtggaaaagataatatcaaaaatgcttggcactgtatgacaaggttacgttttgatttaaaagataaaacaaaagttaaccaagaagctatacaaaatctagaaggaattgttggttcacaatttaataaagaacaatttcaaattgttattggaacaacagttgacaaatattataatatcttaattacccaactagatctaaatattaataataattcatcagataaagatagcaataatcaattagatgataaaaagagtctaacaactaggtttatggatacagtatcaggtgtttttggtcctatagttcctgccattgcaggcgctggaatgataaagggattaatagctggattagttgccttaaaatttatagctggcgatactgatactatgaaggtcattgatatgatagccagcggtgtatttacatttttaccattctttttagcagtttctgccgcaaagaaatttaaaacaaatgaatacttatcagttgctattgctgcaacaatcatgtatcctaccatggttgatactgctaaggctggcaaaataggcgcgttttatgtttttggaattttacctataccagtatttaattattcaagtagcgtaattcctattatctttgctgtctgggtattaagttatgttcacaaattaattgataaacatatgcctgatactatgcgtacagtatttacacctactctgacattatttatttctggattcttaacattaggagttactggaccaattggaatttacttaggaagagggttagcatggattattgcaagtttatttagtatttctccaattcttgctggagttatagtaggcgcaattcgtcctgttgctatattaacaggaatgcatcatgccatgacaccgattgctcttcaaaactttgctacacaaggttatgacatgttaatgcctatgatgtttatgacaaacatttcaatcacaggagcagcagcggctgtttattttaaagaaaatacaaagcaaggtaaaacaatagttatttcttcagttatttctggactttttggtataactgaacctgcattatttggaatactaagtaaatacaaaaaagctttcttagctgcaacaattggaagtacagttgcatctgcttttattagcttctttggagttcgtttatatggatacgttctatcaagtgtattcagtataccagcttatattggcccatactttatatatgctatgttaggtatacttatcgccctaagcgtttccttcgctttatcatatctttttgttgtaaaggggaacaaagaaagtccttcttcagtaaaaaataatgatccagagactataagcgaaatggcatctgtaatgacaggggaagtaaaagctataactgaagcgccagattcaacttttgcacaaaaattattaggtgatggttttgtagtattcccatcaactggcacagttgttgctccttttgatggcaaaataacaatgatttataaaaccaaacatgctattgcactaacatcaaatagcggcttagaagttttaatccacatagggttagatactgttactttaaacggtgagggatttgagttattagttaaagagggcgataacgttaagataggacagactattttaaacgtggatttagctttcatgaaatcaaaagaaattcaaatggcaacgcccgttataataactaacttaaacgaaaaagtaataacccttaagaaaactggtaatgttaaagctggagaaattgttttagatattaaataattattgaaagcaaaataatatttaattaaacatataataaattgtaattcatattattctaactaaaaaaaatcacgacatttgattattaattgtcgtgatttttttaatttgctcattataatattactttatatgattattttctattcttttcaatccattcaactgcaaaatctacaatttctcgttgtcttatgaatcttacgtccgcattccctatttttgtatttccaactctatactttttctcaaaatcaattcctatatctataaactcttcaccatcaacatatagcgttgaatacgtaacccatttacgctcgccatctttcatcattgcacaactgtttttctccatatgctttgatggataatcagctctttcatctgctaagtgaatagatgtatttttatcatatccagttcccaatagtaatacatatccatctaaatcatataatttcccaattggagaactttctccgaaaatatcgcttaaatcatggttgtttattaaatattgtgcattttttccccatgcagcaaaagaccttacaggatgatcacttcttaaaacacctgaccactttctaaacatttctgctactgctcccattgtatttgttggagtaatatccttatcataagctggccaattatctcttataatatcccaccactctattggttcctcccaatgtacaccatatgctgggtccatgtttttccacgtctgtgtaggcataattatggttccatcttttccaactaactctattaacgcttcaattatgatctgtgggcctccacaaacaaatccaaaacttttcattgaagtatgaactataatattttgtccattttttacaccaagttgttgcagcgcatttactatatcttttttaattacaatttttctgtcacccataccctttccctctcaatttaatatttagtttttattatctcttctatatttcataggcgtgcaacctactatatttttaaatagcctattaaaagttttaatgctattaaatccacagttataggctatctctgcaatagtttcatcttcctcaattatacgccactctgcttttttaattctataattatttagataatctaaaaatgtcactccagtattttctttaaaaaattttgtaaagtaatatttactaaatcctatggactttgaaatgtcatctaagtcaatacgctcttgataattagtatctacatattgaaatacactatccattttctttaatctttccttttcacggcttaagtcttcagatgaatatgattgcttaggcatatatctaattagtatacctgccagatcatataatctagcttttattattaacttatatccttcctcagccttactatattcattgataatctcatttatgtgcctctccattagtgcgtgaatttcattccccatagttaaatgtattgattgattccacataggttttattattttagtatctttcgttccagaaagaaaattatcatatatggaagttctaaattgtattacagctctattactgaattttttctctttaaaaaaacaatgtatttctccaccaccaattataagtatgtcaccttgcgttaaatcataagtatctctgttaatacatgcctttagtgtaccttccacaagataaataatttctatatcttcatgccagtgatgtggtgtattagaatacccatcattaaaaaacaatctaaaaggaaattcagattctaatactgttttttcaaaactcccatgcataaatatctcctccaaaataattacaattaagcttcttgattaatttctataactctatcactttcttcttgataactgattcacgaatactctccataagcttaataaccctcattacctctgtattctttacaagaatttcttcttctcctcttatagctcccataacatttctataaaagtccttaacatcagaattaacaattttaagtgcttcttctttaattgtttcctctgtcctaggcgccatagtttttgttaatccggcagctgttctaataggaattgcatcatttttactgctatcagtaatacgaacgactttgcctcttaaattccaatcatctattacagctgtgccattttgacctaacacataccagcgcggtaaatttataaaattacttgttccaacttctacaacgtaaattaatccgctttcaaattctaactcagcagtaaatccatcatccacaagttcattggtaacatgagtaaatctagcatatactgattttatcctttcattaatcatcatgcatgcctggtcaataatgtgaacaccccaatctaaaagcattccaccaccatgttcttcttcttgtctccaatcacctggtatgccacgagatccatgtactctggactctattctaaagacatttcctaagatagcttcatcatatatcctttttacagttaaaaaatcctcatcccaacgtctattttgatgaacaaccaaaactttatccattccttctgctatatctaccatcttcttaaattctaaagatgacattgctgctggtttctcacaaattacatttttgccagcttttaatgaactgattactatctctttatgtacatcatttggtgttgcacataaaacaatatctactttctcatcttctaaaagctctttaaaagaattatacggatttattccatgctctctagcaaacgcttgtctatcttctttaatatcataagtaccgcaaacagtcaaattatcaattccttcaattagctcacgatgccaatttcccatgcctcccaatccaactattgctaaatttaacatctcattacacattgttttatttctccctattaaatttttataattatgcccaaaacatatcacctttagcttcaaaaataattgcatcctttaaacaatttattgcttttatcaacccttcttctgttgtcatcaaactatcctcatgttctatactcaacgcatgatcatacccaaccattctcaatgcagaaacaatgttcttccaatagccaacatcatgtccatagccgacagagcgaaaaatccaagaacgttcaatttccttaccgtagtggcctacatctagcacaccgtttattggacaattgatttcatccatctttgtatcctttgcatgaaagtggaaaatggcattatgctttccgagctccctaattgctgccactggactaactccttgccaaattaagtggcttggatcaaaattagcaccaatttctggtcctacagcttcgcgcaatcttaataaacttttaggattatatacacaaaaaccaggatgcatttcaatagctattttatctacgccatgagcctttgcaaatttcactttttccttccagtaaggaattaaaactttattccattgataatctaatatttcaataaaatcctctggccatgggcaagtaacccaatttggtttttgggaagtttcactgtcaccaggacagccagagaaacagtttaatattcttactcccattttttcgcacattaaaattgcattagtcaaatcatcatcgaatttttttgctatttccttatttggatgaattggattgccatgacaactaaatccactgatttctaaaccgcttctttctaaaatagatttaaattcggcaaacttttcttcatcttttaataaaattactgggtcacaatggtgtttccctggataacctccgcaaccgatttcaattgtttgtacacctttacttgccaaaaaagaacaagcatcttcaaaagatctatcttgtaaaactggattaaatacacctaatttcatataaattcatctccataaaatataatattattaattatttaaaatatacagccttaccagttttagcagactcatatattgcttctaatatttgagtaactattaaagcttgttcaggcctaaccactaattcatcaccattaataattgcattatagaacgtactttgttctatatcaggagcattatcttcttctccatcataaaaagcaaccccagtagcatctattgcaggcttttctatacattgtttattatacttaacagaatttatcctcaaaccatctttcatatcagcaccagcttttgtaccacataaagaagttttagcttcatcaacatcaagactatttagtgcccagcttgattctagatttattgtagcgccatttttcatcttaataaatccaaaagctgaatcctctactgtaaacatctctttatcccaatcgccccaagcatttcctgtacatgtttgatcccctaacttgtggtatacagatcctagtacacactctggttcataattattcatcatccaaagtgttaaatcaagagcgtgagtacctatatcgattaatggacctccaccttgttcatcttcatttaaaaatactccccaagttggaacagctctacgtcttattgcatgtccttttgcataataaatctcacctaaatcaccattttcgcatgcagcttttaaatattttgaatctgctctgtatctattttgataacctatagttaggattttgccagtttcttgcgctacttcaagcatagctttagcttcagcgtatgttttagccattggtttttcacacataacatgcttatcagctttcattgcttcaatagatatatagctgtgtgatttatttggagttaagacgtaaacggccttaatatctttttcttttgctaaaagaagtttgtagtcagtataaatcctactttcttctttgccatatttagcttttgcttctatagccttttcctctatcaaatcacaaaatgcttctatttctatattttgattcttttttattgctggtaaatgctttccgtttgcaatacctccacatcctataatagcaacctttaatttctttttattacatatattctccataaccattcccgactttcatagcttattaaaccttaaagtttgaagtcagtttttcacttcctttcatagtaaattatcataatttattgctcttataaatgatacgtatcattgcctttcataaataattctatacttaaattcgtctatttactcgccattaattgcttagttattctcaaatattgttttgagtatattctttgaatactatgatacattaattttccccattaagttaaaacttgaacgtttgttatcgatattataaatattaatagattggttaattccaaaaaactttttcctccctcctcatcccagccttcttccatctcctaatccattatttaaaaaccataaaaaagcacataatcacattttccatctgttcatgggcctttactttaataactttattaatatataaaaaacatgttgtttataattttcgcttagtgttatatttttgcaggtttgaattttgggccaacaagtacaaatgaacgcaccgaatttcattatttaaaaattccaatactgctcaattaccttatttaaatcctaaatataaattttatttacactctataagcttttgaactattcttatactaatttgcttacacttattcttaagagattatactattgtaatttaaaaatacaccctgcctctttctgctgaattaaattttccccagttaagtggcatagctccttttccacttattatagaggatatttccacgatactatcatatggtaagccagctattgctcccttattttgagtactaactaccattgtagttcttttgtcattataaattgcattaatgcattcacatgcatttcttaattcatgaactctacaccttcattatagtatgggcttaaacaaaatataatatagtctttattcaataggataaatgattcatttatatgagcacatatataaacaaattaatcctatcaaaaagtaacacctcaatattcaatttttgatattttcttcaactttccattactatacattaatagtcttaaagttaataaagtttttctctcaattcttgaaaattctataattttaagttcaataaaagtaaggtattgtggttaaaatcactagttaatttaaaatacaataccttatatagcataattcttatagaattctcaatatttaatgatagaccaaataataataagcggttaataactcatcacattggcaaaattattaaccgcttatctaaattttcaaacctatacttttttcaataaaatcgttatttctctacaatgctctaaatatatgttgattacctgctaatcagctataaattttgtacatttatttagaatttcttcaggaatatcttgtccaattccaggacggtcagatatagtaatatatccatcaactggtgtatcatcatatgctcctaagcttctagtaaagtcagacatattcccaacatgatattcatgaatgcagaaatttggaattactgcttctatttgaagcgcagctgcattggaaattggtcctccacaaacatgcatttgaactaatacgtcataaatttgtgccatatcacatattttttttgcctctgagattccaccacaattagctacatctggctggattacatccaaagatcggctttgtaaaaacggaagatatccatatcttgagtagattctctcaccagaagccaaaggaatatttgttttttcttttagtgatgacatcaactgtggatttaatggcccgcatggttcttctaaataatagatattaaattcttcagcaagtttagcaatctgcaatgcagcattaaaatctgtctttgcatggagttctaagataatgtccatctcatctccaacggcatttcttatttccgctaatctatctttacacaatttcaatttgtgatttgttagcaatccatcgttacgcaaattcttctttccaaattcatctctctgtaaaggatcaactttgagtgctgtatatccatctgctctagcctttcttgctgcttctccatattctttaattccacctaatggacgtgaatctttgtcccaatcaaactgaatttgacttgcatatgctcttactttatcacgtacttttccgcctaacagttcatacactggaactccaagtaactttcctttaatatcccatagtgctatatcaattgcacttatggcagaaaaaattactgttcctccacctagtccccagaatgtctctttctgaagcttattccatattttttctatattcattggattctctccaataattaatttaccaaaatcctgaatttgaccaattgctgccaacttggaatttccataagccacacctgcttctccaaatccacaaatacctccatcagtatttattcttacaaatactggttcattaggtgcatttttatcataatctgcacaaaatatttctacacttgttattttcatttattaactcctccttttaattaattatctgcaaaaattcatcatttatagacaattcatctttctctatcactttaatatcttcttttgatgaatttggaactacgacaataacactggtatcatatccattttcttttataaaatctaaatcaatatcaactaatcgatcgcctggatgaataattgtgccttcctctacataagtactaaagcctttcccttgtaactttacagtatcaatgccgatatgaatcaaaatctcttttccactattgcttataatcccaatcgcatgaccagttggataaatagaagctacttttccttctacaggagaataaatagttccctttgttggtataatagctgccccgtatcctaatgctcctgatgaaaatgcttcatcctttacttcttccaaaggaatcactttgccacaagcaacacttgtaaatatttcattagctttgtcagtttctttatctacaacggattctgaactattctctacttttacaaatatataagtcaaagtaaatgacaatactaatgctattattgcagtaataactgcattgatgatattacgtggattagcacctataaatacaggcaatgacaagaatcctgccgaagcaattgcatatctaactactcctgtaacacctgcatataatccagcgattgcaccagagagcattacacatactaatgtacgtttgtatttcaatgttacaccatacaacgcaggttctgtaatcccagataatgcagtaataccagctgaaattgcaacttgtcgtttctctttcttctcttttaaagctattgctaaagctgctccaccttgtgcaacattacttccaagcattcctggacccatgaatgtttcatatccaaattgggatacagataatattgcaaaaggagtaattgatacatgcatccctaccataactaaaagaggagaaaaagctcccataacagttggtactaaccaaggaacgttttcattaagggtcttaatgactacatagatacaatttcccatatatgctcctaatggcccaataacgattaaagccaatggagctgtaatgatcagtaacaacattggtcttaacatagtttttaacacttgtggtattattctctcaataaacttttcaagatagctcataaaccaaactacaagaataataggtataacagtagatccatattttactgctttaacaggcaaatcaaataatgcaataccgttaccagaaacaaccaaatccaagaaattgggatgtaacattactcctgcaattgccatagccataaactgatttgtttcaaatttctttgcagcactattcgctatataaaatggtaaaaagtaaaatggagcatctgaaattaaagataaaattttataattttgtgtattattacccattccaaaaagtacacataaagaaagaataactttaaccataccacctgcaataataatcggaataataggtgccatgatcccaacaatcatatttaaagcagcttttggtgcacttttaaaatcaaattttccgcctatgctttttctttccacatttttcccagccccatgttttagtaaatctttgtaatatttatccacctcagcgccaattattagctgaaattcatccccagcttgaacagtattaataacccctggtacctttttcaattcttccacatcaaatttagatttatcatttagtttaaaccttagtcgtgtcatacagtgatataaatctttgatgttgtcagatccacctacatgcttaataattaaattggatatatctttttgatccatattaatccactcctatacgcaaattctttttctcatactctacgcctcttaaatattaattcttcattacatcttagtatccattcatcattaaatctataacaacagaatctgttgagtgaacaccctctttttttaattcttcaattttatttttaaactgtggaagatatttttcatgagcaacaagaagttcatttaatacaatccttgcttcattaccatgctgtactaatgggtttatagaaaacgcttctaacgcagttccataatctccagtcaaagcagctttaattgtacattcttccattgctttcataatctgaatatagcctttctcaaaagaactcatttccccccatgctataggctctgctcctcttgaagaaattatgcttgatacttcaacaatcgaatcactatcaagacatggaattgcaccattattctgagtacttacaaccatatggattcctttattattataaattgcacttatgcattcacatgcagcatcactataatatgctccaccacgttttgataactcttctggctttatagttaaatctttgtttatatataatttgaataaagattcttcaacttctttaacctgctctgcacgtgttccttcttttttaaattcctctatggaatgattaagcatttccttttcacagtagtaataacgatggtatgcgcaaggaatcactttcgtagaatgaagcaattctaatggaagatctgcagagaaaatattctttggcaaaccactttctttatcattaatacggtttattatctgctctgtaacttcatttcccttttcgtcaaaaactctatgccagtgaaaatgatttagccctgcaaactgataacttaattttgacgcatcaactccaattgttgctccttctttcatcatagccattactggaacattacataatcctatacactttttccatccaaactccttaataaccgcttctgtaatcattccgctcggatttgtaaaattaataagccatgcatcagaacataattctttcatgtcttgtataatctctttcataactggaattgtcctaaaagctttgaacatacctccagctccatttgtttcttgtccaagcattccgtgtgatagtggtattctttcatctttaattcttgcatctaaaagaccaactctaaactgcgtagttacaaaatctgcatcctttaatgcttctcttctatttaatgttgttactaccttcaccttataaggcgttgcatcccacatacgctgtgccaacgcacctactatttcaagtttttctctcccatcttcaatatcaacaagccatatttctcctattggaagctcactatatctttttatgaacccttccataagctctggtgtataactacttcctccacctattgttgctatttttaaagtttttttcataccatatgcctccattaaaaattatatatttttctcttgtcttgtgactaatatataattttaaacgttttaattcaataaaagtgatataatctgatacttttttctaaaacttttctatctcagctcttttttctgacactttttgaaactttaataaaaaaactcatcagaattttcttctgatgagtttttttattcagtaatatctctattatcaactatattcgcaatttccttaatatattttatgttatcattataatctcttttaaaaatacaactataaataagatcaagcatatactgcattgcaatatgagatgaaaattgagatattctatttttaaaattttctctgtcacttatatataatcgatgctttatatattctggaacactcgaacttccaaccctgcctatccaaattgtttcaatacctcttttataaagtacctctgaaataggcttaagaaaattggactttcctgaatatgatagtagcaatgctgcatgattcttttttgatgcagttgcagtacatctctgatcataaaaagattttgtacaattaaccatccttccaatagaacgcattttgtccataaaattctctgctacattactgttatgtgcatgagtataaatatctataacatcagctttatgaagaatactcacacatgtgtttagcttctcaacatcaatatatttatatgtatctcttatagttgtttcatataattttataagtttctgtgcaattactccctgagtatcaccctctaaaaaagggaaattaacatcaatatcattttctattttactttcctctgctatgtcctgagcaacttttaccttgagttcattaaatccatccacacctattttcttgcagaacctgtgaattgcagatttagatacaaacgttttttctgaaagttgctgaatagataatgtacttatttcgtttttgtttttaataatatactgtgcaagaatattttctgtttgagttaatttatcacaacattttatcatattttcaattgtcatatttaacctccaaattatttaagctgtaagtgaacagatttactagtatctatttacataacaagtaagatcaacagttccgccattatctataataaataaatttgatcttctcaagtttctgagaaagtgctttttcaatacagcaaatgttcctttactattttatttctcgttttcaaagaagattcgtatcccttttttcatattgcattttctccatatatattagtcttttataagttttcttatttctccattttctattactagatttctattatcaataaaaatattctatcaatgttttctatacttctcaacacaacttcaaataatttcttcacaaacacctatatcgccgcaacttgaattacgcttttccattattccgttctttacttaataattttttaacacttgcttatatataactcttctttgcccattcattcagtaaatctcctatccttattcttcattataaatacctttctattgatctactaattcatatatacatcaattaggataaattttatattaatagaaaaactaatatttattattaacttttaaacaacgaattggaggattattaatgaaaacattaaaaagaataattttatttattataataatatcaactgccttaaacctaatgattaatgttaaatttaatgcatttgctaacccaacttttaatcttaatactacctctgtaattaatgctgcagtattattctctaattccgatgatttatttctattacaactaaaacaaagtttagaagatattcaagaagaacataaggatattcaatttaccttctattatggaaaagataacatttccctacaatatgagacattagattcaattcttaaaagtaatattgatctaattatagcaagcttagctgatacaagcgaagatgtaatagaaaatgtcatattcatggtcaagcaaaaaaatgttccaataattttagctggcattagtccagaagctgcgtcaagaatttcgaactattataacaaaattgcttttatatcatctgattataagcaacagggtatatctcaaggtaaaatgcttgttgatttatggaataataataaaaatgctctagataaaaataatgataatatattacaatatattttgctacaaggtaaaaaagctaatcctgcagcaattaatagaacaatatatgctatttcaacaattaatgattcaggaataaaaacacagcagcttgcgctagtaaatggaaattggttaagggaattggccaaagagtcaatggattccttatttcttaaatatgatggcaaaattgaagcaatagttgcaaataacgacgctatggcaattggagcaattgaagcattgcaaaaatataactataataaaggtgataaatctaaaactatagccgttgttggagtcgatgggctactcgaagctaaagatttaattgataaaggctttatgactggcacaattgttcttgatccaaagattgaagctgagctaatttataatattgcgatgaacttaattcacaacttaaatcctatagaaaatactaattataaaattgttaatggagaaattataattccatatccagatgataaatatattaaaaaatgataataaaatctttaatttagattattttttgaattcctattcaaaaagtcggttatttaaatacttcatgacctcccccctcatatagcttgtttatgacatcttcaacagatgtttgcccaatgctagctataattaaagttagcattaatgaacagtttataaacataatatatattcaataaaaacttggtcaaagaaaatcttcaatcactatgaatgtttattctcatgttattaaaacaatgtcaaatactagcgttaacatttttgaaaatttaataagtactcaacttccaatcaactaaatctcccgtcggaagaatgtcggaagtcggaagtttttgagcttatattattttaaagaatggctttatcttgttactttcaaaaaagccttttcctccacacacccctcaaccccgctttcctccgtcaccgattcaaaaatagtttttccttatctcctcttctaatccgttatttaaatccccataaaaagaaaaaccttatttaattcaaataaagtctttccttttctcttgcaaatctcttgctttctattctattttttcttatccattaaagcttgttcgattgattattgatccttgctaaaatccctctaagcctcgccattactctatcctaacctctaaccctatctacctgaaacgctctaacgagcggggcggatagccccctttctggttaagcttcaagcgtcctttccttgcagtattcttgcgtggaagaactttatttgaaatatggaagaggtttatttgaattggtaagggattattgtgggcttacatatctcttagttaataacgcgacagtttccacatgctttgtatttggaaacatgtctacaggctgtacttctattgttttaaatccaaacccttctaaatgttttaaatctcttgctaaagtactaggatcacatgatacatacactactcgtttaggcttagcttctcctatagcatttagcaacttaatatcacagccctttcttgggggatccacaactattatgtctggtttgattccattttttattaactctggaatcacttcttcagattttcccacataaaattccgagttgtctattccatttatttctgcattatctatcgcattatctatcgcttgttctactatttcaactccatagacttttcttgcattctgagataaaaataatgttattgtgccagcaccgcaatatgcatcaaaaacaatctcgtctccgctcagatctgcatattccaaagctttattataaagtacttctgtttgaataggatttatttgaaagaaagataatggcgaaatattaaatttatatttacctatataatcagatatataatcctgcccccacaaagttatacacttgtcaccgagaactagactattatttttagtacttatattctgaattactccctttaaattttcaacctctaacctaatatcctttatcagttcttctttctttggaatttccttatcggtagtaatcaaaactaccataatctcattagttttaaaaccatttctcaccattacatttctaattagtccttcactaaaaaataaattatctttcctagcaggtaatatagaatactttttcatccaatttcttattatttttatgattttatcagtttcttcatcttgaattagacacttatccatatcgaccacttcatgtgttttttcactaaaaaagcccattgaaagttcattgtctgtcaatgcaattgaatatattcccttatttctatatctgtacggaaattccatccctatagtatttttaactatatcccccgataatccaccaattctttctatgcaatccttaactctattgtatttaaattttaattgtgaatcataattagaatgcattaaagtacaaccaccacatttttcataataattacattcaggtataattctttcgtcacatttttccactatatctataagctttccataagaataattctttttattcttgattatttctgtctttacagtttcccctattaaagctcctggtataaatattggatatccatctatctttgcgacaccctcaccttcatatcctaaggaatctatttttacaatatactctttatttctctctaacacatgtacacatccttcactgttagtatcatttcctaactataattttcaaatcaatatttaaaaatactttctacattttatcatatcttattcatttatttaagatatttataaattcttatatacaattaagaacaaactctaaactattaaattctcatttataatggatattatatttagacttaacatttcaataacttcccataaaaatcaaataatttactcacgctagaatttattttgtcaggtaataaataattaatgatgattatgatatctcgatttaatcaacctcttagcaccattaaattatataattttcctaaaataaaaaaagagcaccttgcggtgctaatacagaatcagttgccatttaattccataatcattaaattattatttctcttttagagcaataatatacattatatattaaatatcctatctttaaatgttaattttttgttaactttatatatttcttaaaatttgattacatatttatcatcttaagtgcatgtatatattggattttatgcttaaggagcatttaaaaccttccatgtaaaaaaatcgcaggcgactgtggttaagttccgtattgtacttcgcactcttttcatatgtgtagatttttttcacgcatctgccttttcgaacgcatgtgagaaaaatctgcacatcagaaatagcagctctgctgcatataagaacattttatgcagacgaataagatttctttttttattctttttaaaataccaaaactatttaatcaaccttttttatgctatccacagattttacttgaatataaattcctaaagaatataaagggactttggtaggattcctaccaaagtccctttatatatattaaaaaattatgtttcaaatattattttacttcgctaatctttaaaagatttgttgcaccaacttggtctacaggaactccagctgctaatacaactatatctcctgatttaacaaattcattatttttagctatttcaactgatctttctaacatttcatcagtagattccattttatcagcaactactggatatactccccatgagaatgctaattgtctagcaactattggatctggagtaacagctataattgggcattctggtctacattgagaaattctcttagcagttgcaccagtttgagttgaagtaattactgctgctgcttctaattcattagctgcattactagctgctcttgaaataactcctgctatagctggaatatgtgttttagcttgagaaactgctactttatattctaaagatttttcagtttcttcagcaatcttagccattgtagctacagcttctactggataatctccattagcactttctcctgataacatgattgcatcagtaccatctaagatagcattagcaacgtctgaaacttctgctcttgttggtcttggatttctcatcatagaatctaacatttgagttgcagttacaactggtttaccagctgctttacattttttgatgatcatcttttgaactgctggaacttgttctattggaatttcaacaccaagatctcctctagctaccattataaggtctgaagcttctaagatttcatctaagttatcaacaccttcttggttttctatctttgaacagataaggattctttctccaccatttgcatcaagtatttctctgatagtctttacatcagatgcttttcttatgaatgaagcagctatcatagtaactccaacttcacaaccgaagattaaatctgatttatctttttcagtaagagctggtaattggattgatactcctggtacgttaactcctttatgagttccaacgaatccagtgttttgaacttcacacttaatagcgttaccttcaacagatttaacagttaatcctactaaaccatcatctattaaaattgtatttcctggcttaacatcatttgctagtcctgcatatgtaactgaacatttagtagtatcaccaactatatccatatctccagcatatactgtaaattcagaacccttagctaattcaactttctttggttcaaatttaccagttcttatttctggtccttttgtatcaagaattattgcaatttctctatttaacttctttgatagttctttaactttcttaattcttccaccgtgttcttcatggtctccatgtgaaaagttatgtcttgaagcattcattcctgaaagaacaaccttctctaatatttccatatcttcacttgcagggccaatagtacaaatcattttagtttttctcattaaactaacactcctctttcttcgattaggcacataaaataaaataatgttacaaatatgcaaaataagcaagcatgttgattcattattttttgattgtaccttatttataaaatttatataaataaactataagctaaattattatgataatacttgagcaatatcataaagttctttatcaaatttgctttccatatcaagagcttcatctatatcttggtctattattttattatctctaattcctattactcttgaagttccaccttttaataatacttctatagcctttgctcccattcttgaagctaaaactctatctgtagcagtaggacttcctcctctttgaatatgacctaagattgttgctcttgtttcaattccagttacttcttcaacgtactttgcaagttcaaatgctcctccaattccttctgcaagcattattagattatgcatttttcctttatttttaccttctaagatagttctacaaagtgcatctttatcaaattccatttcaggaattataattgcttctgcgcctccgcagatacctgcatataaagataaatctccgcagtctctacccataacttctacaattgaaactctttcatgtgaagttgaagtatctctaattttatttatagcatctacaacggtatttaaggctgtatcaaaccctaaagtgaagtctgtgtaagctaaatcattatcaattgttcctggtaaacctattgttttaattccaagctttgataataattttgcacccataaatgaaccgtctccacctataactactagagcttcaacaccataagcttgtaatatttttgcagccttttttcttacttcttcattcttgaattcaggacatctagcagttcttaaaattgttccacctctttggattatatcagatactgaatttctatccatgctgaataattctccattaataagtccactataacctctttgtactcccataacttcaattccgttatgaagcgcagttcttactactgctctaattgcagcattcatgcctggtgcatctccaccacttgttaacacagctatctttttcataatatatatttcctccttaaaataccgcaaagggaccttaaatgacccttgtgtacataatataaccataatttattaatcaagaattattgtacataaatttgaaccaattatcaatgatatttaaccattttctgatattattctaaaataaatgtctaaattttatgaaaaatttcacaatacaaataatttgaaaattattttactgaatttatgactatacaccgctaaatatcatattttttcatataagctatcttcatttataacaaggatagtaactgcatttttataatagttttagtgttataaaacaatgaacgtaatttgtcttctctattataaccaataatcgataaatttatataaaataatataatttttgtgatattaatttttgtaatatttttcatttgtatatttactaaatttttaatcgcatctcgtttctaattatgaatctaatactttaacattctcatctcctaaagtttgtctcaataaattcataacatcactatctagggaaatccatctatctcttggcaccctgaacttttgttttcctttgctctcgaatatataaataggcgtatctccaatatattcctttatcaataattcttttaattttttacttaaaacagtagctgccaccttatcatcaactcttaaatatacttttgaagtattgaccttctctaaaggttctatactttcacaaataagttttggtggttcatcttctttcaaacttaatcttcctttaactattaccaaactatctgtcacgcataattcttttactttctccaaagttttagggaacactattacttcaatcgttccagttaagtcttcaagttttaggaatgccattatagaattatttcttgttaccttctgattaacactagcaagtattcctccaaggattactctatcattatcttgtaaggcatcctgcctgttaaacatattaatttcacccatatcgctctctagagaatcatctaaggtttcctgtactaaaaatattttagaaatctcatttgttgtctgcattttcagactttgagcatagtcatctaggggatgcccagtaatataaagtcctgtcatctccttttccatagctaataaattacgcttagtaaattccttaatattaggatagtttacttctggattctttaattcttcacttgcaaataagcttatttgcccatcaatatttcttctcttatcactagatatattatcaattaatttttcatgaacagctaacatcttagatctaaaaacatcaaaatcatctagagccccagcctttattaaacattcaactgcacgcttatttattgatgatggatccattttatttataaaatcaactaacgattcaaatttacccttttcttctcttgctttcactatgcttgctacaacattagttccaacattctttatagctgctaatccaaacctaatcttgttctctttaacagtgaatttagaaaaactttcgtttatattaggtggtaaaacttgtattccaagttcctctgctatgccgatatagtatgctaccttttcactgattcccatgattgaattaagcattgctgcaatcatctctactggatagtacttcataagatatgctgtttgatatccaacaactgcatatgccgctgcatgggatttattaaatgcatacgaagcaaagtccatcatagaatcgaaaattttattagctatttcctctgaaattccatttctcacgcatcctggtactattacttcatcattttcaacaataccatgaatgaaattttttctttcttcctccattactttatgttttttctttgacatagctcttctaaccatatcactacgtcccatggagtatccagctaaatctctaacagcctgcattacttgttcctgatatactaaacatccatacgtaacacctaatataggctctaattctttagttaaatacgtaactttttctgaatttttctttccttctatgtatcttggtatttcagccattggtccaggtctatataaagaaattcctgcaattatgtcttcaaaggaatcaggctttaattctttcataaatgaagtcattcctggtgattccaattggaatactcctgctgtattaccttctccaatcatattataaacttcttcatcttcaaaatctatcttgtctagatctacatctactcctctattttctttaatcattttaacagcatcattcataacagttaatgttctaagccctaaaaagtccattttaagtaatcctagttcttctagtgtattcattccaaattgagttacgatcatctcatcatttttctgtaatggaacatattcaactaatggctttgatgctataacaacaccagcagcatgagtagaagaatgccttggaagtccctctaaatcctttgaaacatctattaacgcctttactctttcatctgtatcataggctaatttaagctctggatttaagtctaacgccttctctatagttattccaagcattgttggtatcatcttagctattctatcaacctctgcataactataattcatagctcttccaacatctcgtatacatagtctagctgccattgtaccaaacgttattatctgcgaaacgttgcttgctccatacttctcgactacataatcaatgacttcttgtcttctttcataacaaaaatcactatctatatctggcatggatactctctctggatttaagaaacgttcaaagattaaactatacttaatcggatctatttttgtaattcctaacgtatatgcaactattgaacctgctgcagatcctctacctggccctgtaggtattccactttcataggaaaatctaacaaaatcccatacaattaaaaagtagtcaatatatcccatttgctttattacttgaagctcatattctagtctatcaacatattctttagcttcttcataatttgctactacttcttcaattttactataatccaaattctgatttctaagattttcaaatacactatatctatctatcagacctttatagcaagtatctctaagatagtcataaggatcttgaccttcttctagcggaaattttggaagcttagattcgtgaaacttatattcatagctacactcattggctatcttaatggtattctccaacgcctcaggaacataggaaaacatatcccacatttcatctgctgattttaaataaaactgatctgaaggatatcttcttctatgaggatcatcaatggttttagctgtttgtatacacattagtacgtcatgtgatctagaatcttccttgcttatgtagtgaacatcattagtagcaactagtggtataccagtttcattagataactttatattttcttcatttactctcttttgttcttccattccatgattttgtaactcaatataaaagtcaccgttaaaaatttctttgtatgttaaggctgtctcttttgctttttcataattacctttaagatggtaagattgtacttcaccacctaaacatgcactcaaagcaattaatccttcactatgttttcttaaatattcataatctattctgggcttataataaaatccttcaatagatgcaactgatactattttcattagattttcatatccaatttgattctttactaacaaaaccaaatgataagttgaattctctttgtctggctgctttatatgtctagactttggtacgacataaacttcacatcctaaaataggttttatatcattttcttttgctgccttatagaaatctacaagcccatataaaactccatgatcagtaatagcaatactcttcatgcctaattcttttgccttcttcataagctttcctatttttcctgatccatcaagtaaactatattctgtatgcaaatgtaaatgacaaaattgtttttcttccattatcctcacctcctctttaaattaacagttaatttatagtttaaaatttacagtttctttagaatttttctaactaaactataaatcttaaaccatatgttatttagaaatctaaagttttactgccttccatatatggccctataacctttttaactttttcaacatgaaattcgttcacgtcataagataaataatcttccttgttatcaaatcttgttataattccaacatcataacttctatcactttttattacatctacccctacttctagctgctttaattccttgatcattccattcatagataataaagtcttttctacaaatttcaaattttctgttgttggctctttcaatttaaataatacaatgtgtgtaaacataataccctctccctttaattttattatttgcttgttcgtaattcctctgctatcttttctatctttcttaatctatgatttattcccgattttcctactggaggatctagcatttctcctaattccttcagagattcatctggataattcaatctaagctctgcaatttctcttaaattatctggcaatctttgcatcccaatctgtgattggataagttttatgctttcaacctgccttacagctgcatttacagttttagaaagattcgctgtctcacaattcacaagtctatttacattatttctcatttccttcattattcttatattttcaatctctaaaagcgatgaatgagctcctattacattaagcaaatctactatttgttctccttctttgatatatactatgaaactattttttctctgtataaccttggaatttaaactgaaagtattgattaaattcgataaatcttttgcatattcttcactatgagttacaaattctagatgataagttttttctggattacttatgcttcctccgccgataaatgcgcctcttatatatgctctttttatatcttcatctttaaaaatatactcctctattctataatctaagctcattattccatcaatttctttgagtattcctgtatcgcttaatagccccctaacacccatttcttcagaaattactaccatatagatattattcttctttaaggagttactctttttcaccattaactttgaatgtatattaaagtgatcctttaaaagtgtaaaaatcaatctagcactagctgggttttctgtggtcattttaaaactaagtccacttccactaaaagctaatgtaccactaaccttcataatagccgatatttctgctaacgcctcttctttcgaaatatctatatatctgcatatctctcctttaactttagatgaaaatgacattctgtttccttccttatctataaattttcttatagtttataattaatcaattacttttcctttttcttctctgactctttccttaatacgttgcgataaatacatatattcaattatctttttcttatcatataaaagtttcttttccattattgtatctactaatatttctgccaacttatctgaatcgtgctttatcaatccatttttaacttttactaaatcgtccccaactatttttacacctagactattaatgtcttctctatctaatttaacaagctccgcatcatctttttgatatttttcttttaattcctctgttatttctcctgtattagcaattacataatcaacaatatctttcccaccatatttgaataaaacctttaaatggtctgacactttaaaacccgtagtctctccaggttgagtcattatatttgaaatgtatattttgatagcactactcttcctaacttcttttgcaatatctttaacaagcaaattagaagttatacttgtatataagctacctggtcccattactatagcatctgcttcctttatagcctctaatgcctctggaagagcttttgcattctcaggaactatttttagttcttctattctagatttttgttcaatagcttcttctggaatttgcgattcaccttttactatattaccattttgtagttttgcaactaattgcatattatccaaagtaacaggtataactttacctgttacagctaatacagaactcattttctgaactgcttcctcaaaattgtcagatattccagccatagctgccaagaataaatttccaaagctttgattctttaaccttccatcagcaaatctatactgaagtaaatcctccattattggctccgtatcagctaatgccaaaatacagtttcttatgtctccaggaggcaacattcctaaatcttctcttagatctccagatccgcccccatcatctccaaccgtaactattgcagttatatttgatgtatagtacttcaaccctcgaagcattgtagataaaccagttcctccaccaattacaactatcttaggaccctttactaataatcttttttcatatattagactttcaatttttctgctatctagagaaactttgatatagcctctatttactaaagcaattattgatttcatcgtttcagtaattgatatatataaaacaaatattcctgtaatatttaaaaacacataaaaaacctggtaatataaattgtaaaccctatggttaactagttctgtaaatccaaatgatattaataatattccgaaaataccaaacgctagccatcgtttcactttaattccagccttaagccaatcttttatcctcatagcttcttttctcctttatgaagatcttcagctacatctctatgctctattttagaattatagttttctttatttaatctttcataaacttcatttgctattgcaactgagcgatgtcttccacctgtacatcctatagatataattaattgactctttccttcttttatataattaggtattaaatatcttaacatatctactaacttttctataaaattcacagtctcctcttgttttaagacataatctttaactggttcatcattaccagaatactgctttaattcaggtatataaaatggatttggtataaatctaacatcaaaaaccaaatctgaatccactggtattccatatttaaacccaaagcttaatacagtaattgataattgcttttcaggataagtatgatctccataattcttgtttattttttctcttaaatgccttatttcgtatttagatgtatcaatgataatatcagctatatttttaacttctcttaatttctctctctcctgagtaatcccagtcaaaactcttccatctggagataatggatggcttctccttgtctccttaaatctcttaataagcacttcatcagttgcttctagaaataatatttcgtatttaaattcatttttctttaagtaatttagggcttcaaaaaaatcatcaaagaaaattccgcctctaatatctataactaatgctactttttcaatatttccgccactttgcgtgcatacttctgcaaacttagagattaactttggtggaaggttatcaacacaaaaatatcctaaatcctccaatgttcttgttgcttgtgtctttcctgctcctgataatcctgtaacaataacaaatctcatactacacactcccttttgccaaagacgtcttctaggcacaactattacttctaatttaccttaacatcaaaattatatcacactattataattaaatcataaaaaacccaaaagtctctaaactcttgagttttatataatttagtgtttattttacagatatatttaacatcttcaacttctatttttatttatattttcaaaactaatataatcactaaaatgcttaatcttcaccccaaattctaacttcaggatataaatctactccaaattgttttttcacttcatccctaacatgatatattacatctaatacatccttagctgttccgttcttacaattaataacaaatccagcatgcttctccgaaacacacgctccgccgatagcaaatccctttaatcctgcatcctcaattaattttcctgcgaaatagccttctggtcttttaaatgtactacctgctgaaggatactctaacggctgtctttcttctcttcttttagttaattcatcaactctagcttgaatcttttctttatcgccattaactaaattaaaagttgcgcgtaatactatatatcccttttgcataactacagactgcctatatcctaaattcaactctgatttaggaattattctaatttcttgattgtcatcaagtacttctgcactttcaataacaaatgaaatttctccgtcataagctcctgcattcatgaatacagctccacctacgctacccggaataccacaagcaaattgaaatcctgctagtgatccttctgtagctgccttcgaaacgtctttaagtaatgctccacattctgcaataatcttgttacctatacattctattttattgagctcgcataactttataacaacacctctaataccaccatctttaactaagatattagacccatttcctattacataaaatggtatattattttctttacaaatagtaatagtttcttttacctgttgtatactgtttggagttaaaagtatgtctactggtcctccaactttaaagtatatatgttcactcattttcgcatctaattgaatttgtgactcttcgtataatttgctgaacaaattcttatattctccatagtgcttcatgccaaaactcctcaaacatttatattaatctgctttttgtttacatgatatagaataatttaaatattaatctaagacaagtaaatttttattccgtactattatagcataatttatttattttgttcatgtttttaatatatattcaaaaaataacataatgtattttaattatacatcattggtacaataatctaaggctaaaaattaggttgagataccccaacctgatttcttttattttgtatttctaaaatactctaatacactattagctgccttcgtatcaattgattctgtctcaagaagttcgtctaatgtagcttttttaatattatcgatacttccaaatttcattaaaagagacattcttctcttctgcccaatattaggtatatcatctaatattgaatgaagcgttctcttatctcttaaacttctgtggtaagttattgcgaatctatgaacttcatcctgaattcttcttatcatttgcatcaaattagaatttctatttattattaattcattattattataaataatccctctagttgcatgataatcatctttaaccaatccacatacaggtatatctattcctaatttctctaatacttcaagagctatattaacctgaccttttccaccatccatcataattaaatctggaaaattcgaaaactttccactagaaaatttaatctctttattttgaatctcttcgatctcttttaatccatgagtgaatcttcggtctaaaatttctctcatactatcataatcattagcactttttacagtttttatacgaaatcttctataatcgctattcttagctttaccattctcaaatacaatcattgacccaacggaatctaccccttgtatgttggatatatcgtaagcttcaattctaagtggtatactatcaagttctaataattcttgaatttcctttagcgaaatcatattaatctctttatctctcaaaatcttatccttaaattgatctaaagtgactttcgcattatttttaactagctccaacatttcttttttctcgccttttattggcaccttaacgaagacccttgagccacgctttatacttaaaaattcttccaaagcttcaatttcatcactttccggaatgtatatattctttggaacttttggtgttcctccataaaatgaaattataaattgtgaaattattgttgtatcttcctcatgggaactattttcaatcataaaatgttctcttccagttatttttccatcccttaaaaagaatacttgaatacagcaatctttctcatctttatagatattaataaaatcttcatcattctcttgagatttaaacaccttttgtttttctgctatattttctatagcaatcattttatctcttaatgatgcagctttctcaaattctaaatttcctgatgcactttgcatttcttcttttaacttatttagaaggctcctatccttcccacttaaaacttccattatttcatctatcatttttttgtattcagttttagaaatacgcccttcacagggtgcattacatttttttatatgataattcaaacatgctcttgtcggcttttcgccttctataatagattttttacaagttcttaatggaaaaatttttctaatcaaatttattgtttcatgtacatctcctgcatttggataaggcccaaaatacttatttccatccttggcataatttcttgttataaaaactctaggaaaatcctcattagtagtcacctttatgaatggataaaatttatcatcctttagtgaaatattatatttagggctatacttttttattagattgcattctaatattagagcctccatttcagaatctgtcactatgtattcaaactcagcaacatttttaaccattgcctttactttttccgaatgatttttagaattttgaaagtattggcgcactctatttttcaatatttttgcttttcccacatagataatctctccaagtgagtttttcattaaataaacccctggttcatttggtagaatttttaattgggctttaaaatcaaacattccaacactccctcctttaaattcaaatataaaaaagtgaagagtttataaggaaaatccttttattatttccaattcagtacttttaagaaatttcaacggttctccaataactattcactttttatctaccatatttaattttaatttccaataaccgcttgcctaattaattttcctgctatcggtgctgccgcactcgctccgtatcctccattttcaactattacagcaactgcaatcttaggattgctcgctggtgcaagcccaataaaccatgaatgaggtttagcgctctctccattagcaagattataatcagctgtaccagtcttacctgctgcatcagttccttggaaataactccaagtagagtcgattcttgaatcaactaaattcttcatatagtcttttataattgcagcattagctgaacttataacttgtttattcacctttggctccactgtcttaactacattaccgtccttatccaccacttggctaacgagtcttggctccatcatcttaccatcatcagccactgtacttgcaaccaaagccatctccataggcgtagctaaaatactactttggccaattccagattgagctatgctaccaatttccgctttagataactttggaaattgactctgatctattttaaatccatcagattctactgtattattaaaaccaaacttctccgcagtagcttttaacttatcatttcctagctccattgccaatgtaccaaatacaaaattacttgataatctataggcatcctttaaatctatttcaccattaacttctccattatcattgctcaatgactgtttatcgttaaatactattttacctgtatcattaaaagttctatttgtaaccccaggcatattttctaatgcgctgctaagagttactgttttaaatgttgatcctggcgggtattttcctgatactgctctatttataaacggactatcttcattagaagctttcattgagccttccaaatcatttggattgtacgttggcttagaaaccatagctaatacttctcctgtttttggatttaaggctaccactgcacccttattacttccaagtgcatcatatgctattttttgaagtgttggatctaatgtagttataacaccattcccaactttaacctcatcttcttttctattcttaaacattgattttaacttatctatgctaaaatctttagttagatttaaaatattgttagtaagcttgttgtatgtggttaactcactatcataatttgcctctaatcctgtcaatccatatcttggatctacatatcctagtgcgtgaacatataaatctccgttaacataagttcttttttgtgttagcgcatctacccttgcacttgttgtaagcggatttttatttctatcatatatggttcccctcaaaacttcatttcttcttgcccaaagcctttgattaccttcactttcagctatagtaggcgccgaaaagacttgaaaatatgcaatatacgagataagagctacaaagcaaaataaaaaaactaccattacctgttttatactattagaaacatttttcaatttttagccctcctccgatatcttttgaagtattgctagtgcaaaaaacatagttattattgaggaacctccagcactaataagaggcaatgtaatccctgtcaaaggtattactgcaaacactcctcctattataactagaacctgacatgctatcatagcactgaggcctatggcattaagttgtgaaaatctatctttgattctaaatgaagccctcattcctctatagaaaaacaagaaatatattatcataattccaagtccaaataccattcccaattcctcacaaattactgcaaaaattaagtctgatgtatttactggcataaatcctgggtatccttggccaagtccacttccaaacattccaccagaagaaatcgaatataatccttgaactatctgatatcccgtagtatctttatacttccacggatccctccatattaatactctttgctgtacgtgcggaaacagtttatatgcaaaaatagatcccaacacaaataatataaatgttattaccacatactttttctttccagttgcaacatacaacattgttaatgaaataccaaaaaatattaacgcagatcctaaatccttttgcccaactaaacatcctaatgagtatacaacaaccagtgcaggttgccaaagttgtttgaaatcttctattatattatttttgtcttcataatcatgtaaagctgccgctaagtatatggcaaatgttatcttaccaaattccgatggttgaatactaaatccaccaattctaatccagttagttgcaccataaacttcttgatgcgcgaacaatgctagaggcattataagcagagttgctatcagatataccttcttgtacttaacaaaatctcttatatctggaattatcactactagagcaataaatacaactattccagctgcaaaatacattaactgtttaatagcaatatcagtatccaatctatatagtacagctatacctattactgacaatatacatgcaaatgtaatcaaaaatttatccccatggggataaaacttccgtattaatatttgagtagcagttattaagccacatactatcaaccccatgtatatagcgcctttatccatgtcatctttcaatattgctaaatttgtaaaaagcgctatacataacaaataagttaacagtaatagctttatttcatctctttttatcttcaatccatatcaccccaccgtgctattcctttgatatttagatttctaaaatacttttgtaaagcccagcggaaaatatagctttacaatacttccccgctgagcctaattttttcaataaaaaattcttttaatattctctttattcgaatattttaaattaaaatcttaaaaattgccgtaccaattcttatctcatctttattagacagttttgctttgccacttatcttattcttgtttaagtaggtaccatttgtgctatttaaatcttctataaataagctactattccttatgataattctcgcatgacttccagaaacatgttgatcacataatacaatagaattatcatcttttcttcctattgtcaaatccgatctgataggaataatagatccatcttttaaatctttgctacttccagaatctataatttctaagccataacttccttttgctgcagtaggccttcttttcttccctccgtttttaacatccctatacattatctttagcgcatagtatattattacatacagtataataataaaaacaattccaaaaaaaccagcaattattctcgaaaaactcatattttcacctcaatattcattcctgtatccattatatatgtaaaataactttcagaaatttataagttataacttacatttacctcattaatgattatacaataaaaaagtaagtatggcatgcaaaagtgccacttaattaatatatattattatatcatctatattattttaatatctacttatcatattctgtcctataatgccccaattgtcaattttcaatataatttcttcataaaaactttattatttttaattttatattatatatattgccaattgagcattataactaccaattataggttttaatattatatagttctaaatatgagtacctattcattaatattcataagttttatttaagcacatctttcaaatatttacctgtataagattcttgaaccttacacaattcttctggcgttccacattttatgatggttccacccttatctccgccttctggacctaaatcaatcaaatagtctgcacattttatcatatctaaattatgctcaattactactacagtatttcctgtttcaactaaactttgaagtatttctattaatctactaacatcatctacgtgtaatcctgttgttggttcgtctaatatataaagggtttttcctgtgcttctctttgatagttcgtatgccaacttaattctctgagcttctcctcctgataattgagttgaaggctgacctaatctaatatatccaagtcctacatcatttaatgtcctcaatttattctcaattctaggtatattttcaaagaacttcaatgcttcttcaacagtcatttttaatacatcatctatattcttgcctttatactttacttctaaagtttctctattatacctctttcctttacatacttcacatggaacataaacatctgataaaaattgcatttctatttttattattccatctccagaacaagcttcacatcttccacctttaacattaaaactaaatctgccttgtttataacctctcattttagcttctgtagtttgtgaaaaaagctctctaattatatcaaacgtgcctgtataagttgctggattagaacgtggtgttcttccaatcgggctttggtttatatctattattttatctatattttcatatccaattatttctttatggtttcctacaggatttttactcttgttcactaatctatttaaacctttatagagtatttcatttactaaagtactttttccagaaccagaaactcctgtaaccatagttaaagtaccaagtggaattgatacatttatattctttaggttattttctttggcacctactatttttattttctgtccattaccttttcttctagctaccggtatctgaattgattttcttccagttaaatattgacctgttattgatttttcacatgccttaacttcatcaagtgttccagcaacaactacttctcccccgtgctctcctgcacccggtccaatatcaacaatataatctgcttccttcatagtatcttcatcgtgttctacaactactactgtatttccaacatctcttagatttttcaaagtatgtattagcctatcattatccctttgatgcaatccaatacttggttcatctaatatatatagaactcccataagtgctgaaccaatttgtgttgcaagccttattctttgtgattccccacctgataaggttccagaatttcttgataaacttaagtaatctaaaccaacatctaataaaaactgcaatctatttttaatctcttttataatctgctcacttataagtttatttttttctgaaaattccactccatttataaactcaagttcttcttttattgacatacttgtaaattcatatatattttttccaccaacagtaactgctagcacttctttttttaatctagcgcctttacatttcgggcatgaatcattgctcatgtattgctctatttcaccctttataagatctgaattactctctctataccttctgcttaatgcattaatttccccttcaaatgcataactataaatagctttaactccatctttcacatattcaattttaagtttttttccacctgttccatacaacaataaatcaacatgttctttatccaaatcttttataggcttgcttaaatctaatccatactctttagttagagcttgaagtattgcatatgtccaagaatcttcttttagccttccgcttccccagcttgctatagctccttccataacacttagctctctattaggtataacaagcttttcgtctatctccataagacttccaagcccatcacaatgatcgcactttccatatggagcattaaatgaaaataatctaggcgatagctcatcaatacttattccacaatctgggcaagcaaaattttcgctaaataaagtttcttctcctccaataacgctaattataactaatccttcgcccatctttaaagacgcttctacagattctgtaagtctaccttcaatcccttcctttataacaattctatcaataacagcttcaatattatgctttttatttttatctaactttacttcctcttcagttaagtcataaatttccccatcaatccttgctctaacgaagccgctcttctttatatgttctaatatcttttcatgagttccttttctccctttaactacaggtgataatacttgaagtttagatctatctccataacccataattttatcaacaatctgatcaacagattgtttagtaatttctttaccgcactttggacagtgaggaattcctactcttgcatataataatctcaaataatcatatatttcagttattgttccaactgttgatcttggatttttacttgtagtcttttgatctattgatattgccggtgataatccttctatatattctacattcggtttatccatttgtcctaaaaattgccgtgcataagaagataaagattccacatatcttctttgcccttcagcatataatgtatcaaaggccaatgatgacttacctgagcctgataatcctgtaagtacaactaatttatctctcggtatttctaaacttacattctttaaattattaactttcgcaccttttattactatcttatcgttcattaaactaacctcctacttaatggacaatacataattcatagttttatgcaatatatcatatattgattattacccattactttccatccttaatttcattaataatatctctaagctcagctgctctttcgaattgaagattttttgccgctaaaagcatttcttctgtaagatctttaattaacttatctttttctttcttagtaagttttttcttatccgcagctttatattcttcgacttcttctgcaacctttgttgcttctataatatctcttacatctttaattattgttgttggtactattccatgtctttcattataatctttttgtatagctcttcttctttccgtttccttcattgctttatccatagactttgttatattgtcagcatacattataaccttgctttctgaatttctagccgctcttcctattgtttgtattaatgatgtttctgatcttaaaaatccttctttatcagcgtctaaaattgcaactaaagctacctctggtatatctaatccttctcttaaaagatttattcctacaagtacatcatactcaccaagcctcaaatctcttattattttcattctttctatcgtatcgatatctgaatgcatataagttgttttaacaccaagttctattaaatatttagttaaatcttctgacatacgcttggttaatgtagttattaatattctaaatccacactctatcgttttattaatctctccatataaatcatcaatttgtcctttaatgggccttataatgatttctggatctaacaatcctgtaggccttatgatttgttcagcgatttcttcagaattatctatttcataagccgatggagtagcacttacaaacactacttgattaattttcttttcaaattcctcaaattttagcggtctattatcatatgcacaaggtaatctaaatccatagtctaccaatgtattttttctcgatctatctcctgcatacattgctctaacctgaggtaatgttacgtggctctcatctataaacataagaaaatcttccggaaaataatctattaatgttttaggtggtgttcctgaagctctaccgtctaatattctagaataattctcaatcccactacaatatcccatttcttttatcatctcaatatcaaagttagttctttgccttaatctttgagcttctaaaagtttatcctgagcattaagttctctaagcctctcctctaattctccttcaattatgccaattgctttatcaacagtctctctagatgttgcaaagtgggatgctggagttatggctacatgatttctttctcctaggatacttcctgttaatacatcaaattctcttattctatcaatttcatccccaaaaaattcaattctaatccctttatttgaatacgaagcgggaattatatctaaagaatctcctctaactctaaaagttcctcttgaaaaatctatatcatttctttcatattgaatttctatgagtttctttataacctcatctctctctttctccattccagttctaagacttatagtcaactttttatattcatctggattacctagcccgtatatgcaggaaacagatgcgacaattattacatcccttctttcaaaaagagctgaagtagctgaatgccttaatttatctatttcatcattaattgatgcatctttttctataaaggtatctgtttgaggcacatatgcttctggttgataatagtcataataagatacaaagtattctactatattatcaggaaagaactccttaaattccgaacataattgcgctgctaaagttttattatgagctaatattatagtaggtctttgtaatttttctataacatttgccatagtaaatgtttttcctgagcctgttactccaagcaaagtttgagctctattattgctttttatggaattgactaatttatcgattgcttgtggttgatcccctgtaggtttaaatctcgattgtattttaaattctcccattatattacctccgatccgaacagacattcgtattatatgtctattttacttttccttaagtattaagtcaataaattatcctatttattttaaatgcttactcatgtctttaatactctccatatatctaaaatattataattattagatgtttactttatttaaatcagttgtaattaaaattatttattaaaaaagataaaattcatcttaaatatcgctcaaataaaaatattattattagttaaagaaaaaagtggccaagccaccttctaattacattttattatctttattcttaacatccttatcatgttttccatcattctctttttctattttatattcaactttattttcagacccctttaatgaatttaaaacatttttaaaatttcctccatcgactggcacaatatcttccttgcttacatttctaggtactactaaaattccaagcctagtatttttattatgcctaaattgaatatcttttaccattccatgagaatcctttatctttaaaactgcattatataagttttcctttaaaatagaatacacttccgcttcggaattaatctttttaccattcactgataaaattttactttgaatatcaactccaaattcccgcatcctagaatccgctgacatttctaaaactaccagaccttcttcatcgctaacaaatttagccacttgctttttctctcgatctgtctgaagcttaagcattaactcatgagctgctggcataaaaatcacaacaaatacttcaccaataattccaaacctagcaatctgagccgaaattgtcagaagaattccataagctagtatgtgtactcctgaagatatagctttttctcttttactttttgtaaatgtaattgatgaataacctaataccatataaaaaggaactatagaaataatacttccagctattaatgcgagtccatatggtagtttaattaatggccaccaatctggattagatatagattctgtcatataactcaacatcgaattattcccattcatagcaataattattgctattggcaatgcccaatatctttttaatgcatatccacctaaaattttattatctctatttgtaaatacaggtacagctcctctatctccatcgacaattactaatatcccctcaataacatggaatactcctataagaattgctaaataaaatatatttagatcaaaaactcctaaactataaggaatgaatatattaatcaatttaattataattactataccacctagaattgctcccgaataagaaaagcatattaaccttggtcttataagcattaataatattgatataacaaacaaatacgatattccagaattttcactaaaaactacacctaaacttgtaagtattatgcttcctataattccacctataattcctaaaacaagttgagatagtgtaagttcaatagatgaatttacactacctcctaaaattattttttgcatagttactacttttttgttctttgaatgtagtaccattattaagagtattaataagaatactaatggaggggttactatagcacctgatacgctccgtagcgtatatataaataaacccatttaatccctccctatttaatcttttctcctattttttcaaccgctgtctttagctgctcatcagcatttttatcatagctcttttcatcaataccaacaggtgttgtaacatcaaaatccggggctatcccttttttatgaatattctctccatttggagtataatatttagaaatagttactttaagtccaccaatattatcatcaaatttaactgtttgctgaactatacctttcccaaaagtagtttttccaacaattgttgctgcgccataatctcttaaagcacctgtaacaacttctgatgcactagcgctattttcattaactagtaaaaccaatggcatgccttcagcatctccaccaattgataatgaatcatttctgttttcatatttatcaattgtgtaagttattatctttcctttcggaataaactgtgatgcaacgcctactgcttctgttaatagcccaccaggattttctctcagatctactatcaagcctttcatcccttgagatttcaattcatcaattgtgtttttgaaatcttctgccgtattttcattcatgaaagtttttatacgaatataccctattgaagaatctagcatattcccttttactgattcaatctttactttttcaggtgttacattaacatcaaattcattagtatctgctctcttaatagtcagttttaactctgaattatttgcctctgcaatcatagacgttgctttttttaaatcgtcaccagacacatcgatatcatttatcttttctattatatcattttcctgtagtccagccctatcagcaggtgctcctttaacagtatctaaaattgttacctgtttatcttttaacgttacagtaacacctattcctgtcatacttccactactttgtttcattaaatcatcaaattcgctttgattcataaatacagtatattgatcatttaaggaattagtcattcccttgatcgctccttctaaaagagcattgtcatcaatttcaccatcaaacttttcaattaatttatctctaactgtaaaaagtgctgaatatttactcttatcatttatctgagaagctgtactcttgacttctggcgatgttcttactagaaatatccctttagtagcaatatagtttcctcctaaaaaggatacacatataagaaatactataaagattactgttggtattaaaattatttttctattttgccttctatttgcaaatatgtattttcttgattccttcacctataaagactccctttcatatgcatcatacatataatcccaatatatatctttatagattaaagtggattatattgtaaagtttttctcaagatttcatagtataaaatactatttttctttattcctatttttattatatttacacttatttgcaaaaattataccactaaaaatttccttaatgaaattatactagcaattccaccaactataataccaccaagcataaattgccataatagagttgagaatataaacgttgctggtacaaggcttacaaataccaattgcgaagcaatccacctaactagtccattatatgctgcaaataaagctccacatgctaatgttgctccaataaaccctattaccattccctctattacaaatggccatctaatgaaccaatcagtagcccctacaaatttcataattccaacttctcttcttcttgaatatacagttagttttgtagtattcattattaagaatattgaaacacccactaatattataaataacccaaaaccaactacttttacaccatttactatccctacaatcttgtctactaattcttgttgatcacctatagtctcaacaccttcgaagtcttttattccttcacttacggctgacgcatattctggagattctaattttactgtaaatgatgctgaaaaaggattattttgcaatgtatatccttttagtaatccttcattttcattcgtagtactttgaaaattcttatactcttcttcttttgattggtaaattacatctttaacgccttcaatttctcgtaattttatttctatctccctttggtcaataagttttatatcatccttaagaaatatctttagttctactttattctgaacagtatttattcctttgtttatattattagcaactaatacgaatattcccaaaacaaagaaagttataagaacagtaattactgaagcaatactaatagtcttatttctttttaagcttgtaaatgcatccttaataaaatgtgcaatagtattaattttcatcttcgtacttacctcttttctcgtctctaacgatttctcctttttcaatagctataactctttttttcatatagtcaacaatttcctttgcgtgtgtagccataagaactgtagttccagacttgtttatatcctcaagtaatgacattatttctctagctgtatctggatctaagttaccagtaggttcatcagcaatcaaaacagatggattattaactagtgcccgtgctaaagaaactctctgttgttctcctcctgataattcattaggaaacattttatatttatgagataatccaactaacgataataccattggaactcttcttcttatatctttttgagatgcttctactactctcatagcaaatgcaacattttcatatacgttaagagttggtatcaatctaaaatcttggaataccattcctatctttcttctgtaataaggtatttgctgcctagtaatagatgataaatctttatctcctattaatatttttccgttggttggttcaatttccttcaaaagcatttttataaaagtagatttcccagatccacttgggcctactaaaaatacaaattctcctgcttctatctcaacattaatatctgataaggcttttacattattattgtaaattttagatactcctctaaactcgatcatactcaaacactccttctttattgtatattccgcaaattaattgcaaaacctacaaaattaattataacataagaatactttctaatgttatacaattttattaaatttggagccatttgttggtaattaatgttgttttatatcattaaatccttcacctaatacttcatgaacttcccccactgttataaatgcatcaggatctacatcttttataaacttcttcaattttatgaattgattcctacttaaaacggcataaagtatattagtttccttctctgtaaatgcccctactccatttataaatgtacagcctctatctaatgtatctattatatatctacttatctcataattacttttactaataataaatatacttttacaagcattaaatccttctataactctatcaactattaaaccaagtagtattatacttagcatagaatacaacgcaacatccactccaaatacaaacgcacttgctaaggttattacaaaatctactaccaataaagattttcctatatctaaatgaaaaaatatatttagcatttttgctaatatatctgttcctcctgttgatgcattttcattaaatatgatagccattccgaatgctgaaattaatgttccaaaaatagttgccatcattaagtcatttgtgattgccactggctttaagaacctctcaattgcccatattataactgataatcctaaactagcataaatcgtcttcacaccaaattttccatcaatgaatataagtgcaactataaataacaatccatttaaaataaagctcactacacctattgaaaaagatggtatgaccgcattaataattattgctattcctgttactccacctgctgcaatattgtttggagcgtaaaagtactcaatggaaagcgcaaccagaattatcccaaatgttattattaaatattctctaaattttgattttttcattgtcatcttccccttttaatttttatttatattagaatttctctcatagttttccttgtttatttttgattattcaaaaatagaaaatgcaagatcctcagctatttcataagctttgtatcttgcattttcggtatgttatattctattattctgggttgattatttctttaatgaaatagctttcttactatgctctactatggcttctactgttaatccatacgcttttaatagttcgtttggcttaccactttcaccaaaagtatcttttatcccaacttttaatactggtactggacattcttctgttaaaacttcagcgactgctgaacctaaaccaccaattatactatgttcttctgctgtaactattgctcctgtttctctcgctgcagtagctaatagttctttatcaattggttttattgtatgtatatttattattctagcatcaattccatctttagccaactcttttttagcttctaacgctaattcaaccattagtcctgttgcaactatagtaacatcgttaccttgtgctaatgtcacaccttttccaatttcaaacttataattatctatgttatttacagtactaacagctaaccttcctaatctaacatagcaaggtccattgtattctgctatggctaatattgctgcttcagtttctatatcatctgccggattaattacagtcatattgggaatacttctcattagcgatatatcttcgatggattgatgagtcgctccatcttctccaactgttaatcctgcatgggttgcacaaattttaacattcaactttggataacatatagaatttcttatctgttcaaaagctcttcccgctgcaaacattgcgaaagtactagcaaacggaatcttcccacaagttgaaagccctgctgcaactcccatcatgtttgattctgctattcccatatttataaatctttctggtgaaacagctttaaaatcagctgttttagttgattttgataaatcagcatctagtactacaacatctttatttaaatttgaaagttttactaacgctttaccataagcttctctagttgctactttatttcccattagttttcccctccaatttcctttaatgcttgctcacattgttctttatttggagcagttccatgccatcctgcttgattttccataaatgaaacacccttaccttttactgtgttgcatataattgcagttggttttcctttaacttcctttgcttttgcgatagcatttatgatttcatcataatcatgaccatttatagtcaaaacgttccatccaaaagcttcaaattttttatctataggaccaggattcataacatcttctatgtttccatctatttgtagtccattattatctataaatgcagttaaattatctaatttgtaatgagctgcagacattgatgcttcccaaacttggccttcttcaagctctccgtctcctaaaattgcgtatactctataatccttcttatcaagctttcctgctaatgccattccaactgccgcagagattccttgtcctagcgagcccgtagacatatcaattcctggtaaatcattcatattaggatgtccttgtaatcttgaacctgtttttcttaggctctttaactcttctacttcaaaatatccctttctagctaaagcactatataatgctggtgccgcatggccttttgataaaacaaatctgtctctatttggatcttttgcgttagatacatctatgttcatttctttaaagaataatacagacataatatcagctattgacaaagaacctcctggatgacctgatgatgattctgtaagcatagaaactatatcttttctcattaactttgagatttcttcaagtttgtattcattattcattatacaaccccctattattaatttactcatttatattatgttttattttaacatatttattctagcatacaaaatatattttgtatacctcattcattaatgtgatatacttttaagcatattcatataatatagagtattctcacgcacaaaaagagtagtacaaataaaaaagattatctataccactcctaatactaatagatataaaacccttttgttttctctttagcttaaattcaagctaaccgctaatgctttatcaacctttttcatgtctgcttcagtcatatgtccaattttttctttaagtcttctcttatctaatgttcttatctgttccaataagacaacagaatctctatttaatccatactcttctgatgaaatttcaacatgaataggaagcttagccttatttatttgagatgttattgcagctacaataacagtaggactatatctatttccaatatcattttgtattataataacaggtcttatcccgccctgttcggatcctataactggacttaaatccgcatagaaaatttcccctctttttaccacaatgtttgccattctaaataatcacactccgcaaatccatgcctcatactcattaacatcatctaacatatattcaaaacctaatttagaatattccaagtttatttcagccatttcttgataaccatttttcattagtttttcaaaatcagctgaaaatccttcgttaatatattgtattaacgatttctccataattccactattttttttaattttattattccctgagttaactatttttttatttttcatgttatttagattaattattgacatcttttcgcctccatagcagtaaaaagttcttataactatgattatattgcaaattatgtcaatttgtcaaaggatttgtattacttctttaccattctctagataattcttattaaatgttttctctacaaaatttctaatatgtactttaatttatatttagatttagtatatcgttttttaatattaatgttggcttgatttctaattaataaatttatttaaatcaaaataaatcatcacttaatgttttttcttttttaaaatcactatactttactattactctctctttattatcatcatctaaaatctttaataatactggaaccttcttatccttatctacatagaattcagctttatttaaatgcttattcttgctgttaaattctatatctatttgtaaatatactcctggtccccaatctgctttaacctcttttatttcatcagcttgcttattagatagtatattttctatgaatgccaaaggataaattacgtctatatccttatcaagtgtatatccctctttatcttcgtcaccctcaacttttatctctgaaccgttataaaccttaactctgttatagtcatttccgaattctattcttgaccccttatcaaaactatagtattgcattgtattttcctcgaattccgacttagaattcttaaacaaataatcaactttactactgtaatactttgtatctttcagttcactaattatatcttcatttgaaggggtaattacatctctacataaaataactaacaaaatcataagtactggaataagcaccaaaatacctataattatttttttattgaacaatacttttctaaaatccataaggcctcctaagatttattactacatattactatttatgaaaatcttagtgactttattcttaattaatcaataatactgttaatttctttaggtaattcggctataatatctcttgcatttactatgtaaacttgtttgcttaatttatcagctatattcccatgaatatatgcacttaaaagagcagcctgatttatgctagctccttgtgacagaaatgcatttattattccggtcaatgcatctcccatgcctcctgatgccatcttactgttgccagtaggatttatataaacttcttttccgttcgaaattacggtattatacccttttaataaaacaattattccatactgcatggcaactgattttgctatgctgactctattagcctccacgtcttcaatactcattcctagaaaccgtgccatttcacctggatgtggagtaataattgccctaccctttaaattatttagcaagtacttattttcccctataatagatatcccgtccgcatcaatcacaataggacatttactgttacttattatcttttccaacaagcttttttctctttctccagccccaattccaggaccaaaagcaatagaacttgctctttttataagttctataaagttatcattatcttcatagtctaatgtcatagcttctgttaatctgcttgatagtatcttttgcacctcactgctgcatgctagtgtagtcaatcccgcacctgctctaaccgtacattccgtagttataaaggctgctccagtaaatccgattcttccagctacaactactcctctaccgtaatctcctttatgaccataaacctgcctttttaaaagcatcttactatattcctttttttctagtatataaaaattattagagtttttcttttttatatactctggaatgcctatttttaatattttaatttttccgacacaatcaatagctttataatctaaaaagccctgtttgacgacctcaaatgtataagttatattagcatgaaccgcgattcctctctcaatacctaagtcacagtctaaacccgatggcgtatcaatcgccaccacaaattttgcatataaatttatacattctataatacttttaaacattcccactaaatctttgttaaggccgacaccaaaaattccatctattaataggtcatagtctttaatatcacttattacgttttcatctatatcgttctctgactttataaataatatgtcattcttttcaattattttttctaatatcccaaagttaattttaaaatcttgactgtaattttcgtctttacttagaatataaacccttacctttttcccatctaatatcaaatgtctagctaatgcaagggcgtcccccccattattaccttttccacataatattaaaaacgattcacctttatctgaaatctccccaaataaacttatcgcagcattttccatcaatacgatactaggaattccaatataatcaatgcattctctatcaatttctctacattgtttagccgaaaaaatttctaacattatattgcctccataactgcataagctatcgcattttcattactatgtgaaatactaacatgcatattaaattcttttatctccaataggttatatattttatcacttaaattcactattggctttcccaactcatttctcaatatttcaatatcttttaatccaaatcctctaaatccagttcctattgctttactaatcgcttccttagcagcaaaatttcctgctactacattccccttaaatccttttaatttgaaatatgcaatctcattacaagtaaatgatctttcaataaaagtatttgttctttgtatcgcacgctctattctacttatctctattatatctgttccaattccaataatcatgatttatcgcctttcttagtaatctcttaccatatactagcgtaaatatttaattatttctataccttaatattaatttataactttctctcccataccaatatcaaactcataagcatgctcatccacatacgtccctataatatcaattaagtgaagtggtgatacctgattattaaacaatttcataagtaattgttttactttgtacctatgaattgatattatatctatcttttctctctctaaattcacattttttaaaccaatataatcttttctttcaacttcaattccatatgcagttatccccttataatccttttttataagcctatatgcatatttatactctacatcagcatcactattaattgatgtatattcctcaaccaaattcataaccctttcaactccctcaagatagtaattccttgtttacaaacctatagtatcacataatgtatcaataaattgtcaaagcatgtcctctttttcaagatttatattttttttattgacaataaaacttcttcctttattttttacaacatatacattctttaaattttcatataaaaaaagtcttttgtcgaaatcagacgaataatgcactgtatatatttttcaaaaacctaatatggcttttatttacaatcgaaaccttattaattatcataaagaaataaaaaaagagccaatagctcttttttcacctcataatctctttttttgtttcaccataattgaaaaatatataatagatatcgtttacaatattattataacacatattcacataaatacaacactttttctacaaatatttttcatttattattacaatataaaaaacatttttttcatttctatataaacactacttatcttactttaatgactttagtattcatttttagttctattaaattaaactaatatcataagcgttttttataatcaagcattttattaaaagaatatttattttaagcatacttttatttgtaagtaaaaatatactttttatgttatcacaaaggttatctaaacgcattgataatatctaacaattagataacctcttctataaataagtatatttatagttatatacttatctatccatatagcttatattattaaaatcaactaggctaatatttttacaacgcctcagtttgacttttcttattctcaagaaacttaaaatcttctgctataacctctgctatatactttctatttccctccttatcctcataactaccagttcttaatctaccgcttaaagtaataaggcttccctttttcatatattttactataacttcagctttttttccccaaacttttataggtataaaatccgcttctctaattccatcaggtaatctaaaatttcgttgcacagcaattgtaaacttggtataaattttttctccattttcagtgtgcctaagttcagggtctttaactaatcttcctaataatattatcttattcatcttttacctcctgaatatttttcttctaaagttatacccacttcggtaatttctattcaataaaaaatcaaactttataataaaatttaatatcattgtctacctgtttctaatcattcgatttctacctcttaactcagatgtaacaaaatttatctctactcctaagatgaatattattgatattaaaaataaccatgtcataagtataaatactgcaccaagacttccataaaacctagaataattattaaaattatcgatataaaatgaaaaaacaaaggacactagcacccagcccactgtgctaaatatggaccctgcgattacctctttccataccaactttttagcaggagcaaatttataaacgcaaataaatatagatatcattatcgctaatataaaagtatatctgaatatattccaaataatcaatattatttcataaaatggattgatacttttaatataatcgcctattacatttccaaatactaacgctgttaaagctagaattatagttacagctaatgctaatattcctaacatagaaataattgaaagtttaataaatgacctttcttctttaaagttgtacgccttatttatgctttttattatagccttaaatgcagatgacgctgtccatagcgttaacaatatagatattcctaacaatccagtatattgattgtcaaatatctctacaacagttgactgagttaattccaatacactcctaggaagcataacatttaattgtcccagtatttgtttagagcttatgctgctaaatccagctaaagtcatcaaaaataacataaatgggaaaaatgataatattaaataatatgctaactgagatgctagtgcaaacacatcgtccctcttaatttttactataagatgtataattaaattaactttgctacttaattttatatatttcatttaatcaccaatttctatttatattaattaaatatctatttattttatgcagtacttattttattcgcttttcacaaattatatgtactattaataaatgtaaataaaagaacacctccataaaattatggaggtgctctttttataaacagtatattctaactaatagtaactcattggaattaatataccattcttgcatagaatcagcttatatacaccttgaaaaacttataatttataaattttctctctattattaacaacatttttagttgcatttctagtatcataaataactttagctctagacacaattgattcgtaatcgtaacaactatgatttgtagttataattactatatcagactcgtctataacctctttccaatcaacagaattataaaccttacccttatatttagaaatcggacaatacggatcatttaccattaagtcagcgccattcttttctaatagctctattaccttgaatgctggagattctctataatcatcgatatcattcttatatgcaactcctaataaaagaactttcgcaccatttaatgcctttttattcttattcaaaatcttcattacattatctaatacaaattcaggcatagaatcatttatttctcctgaagtttctattaatcttgtatgataatcatattcttttgctttccactctaagtaaaatggatcaagaggaatacaatgtccacctaagcctggacctggataaaacggcataaatccgtatggcttggtcttagctgcatctataacttcccatacatctattcccattctattacataaaatagccatttcgttagctaatccaatatttatatttctaaatgtattttccaatattttttccatttcagctacggctggagatgatacagtatggatatctccctctaatatatttctatataatgctgctgcaacttctgtacaatcaggtgtacaccccccaacaactttaggagtatttttagtattaaagtccttattacctggatcaactctttctggtgaaaaggctaagaaaaagtcttctccacatttaagtccactttcttctagtattggcttaagaacctcttcagttgttcctggatatgtagtactttcaagaataacaagcatacctttatgtagatattgtgcaacactttttgttgaatctacaacatatgataaatctggttgcttatataaatctaatggtgtaggaacgcaaatacaaatagtgtctacatctttaacaaaactaaagtcagtagtagctcttaaagtattttcttctactatcttctttaaattttcatccactacatccccaatatagttctttccttcattaaccatatttaccttttgatcttgaacatcaaatccaatagtttgataaccagcattagccttttccacagctaatggtaatccaacatatccaagaccaaccacaccaacttttgcagttttattatttattttatctaataattgttgttttaataatgacatcttatacctcctgtaatttacggcctaaaattttatccacagaacataatttactaaaaagttttattaacaaattatacaatgaaatgttaataaataaaaatctgtttttctaatctatacattctactttttctttatctttgctatactttttcccacaagctttacaagttgcatgctcatctttaaagttcaacttttctccacattcacatacatatcctatgatacttgccggattgcctactactaaggcataatcaggtatgtgtttagtaactactgctccagcacctactaatgcatatttccctatattatgaccgcacacaattgttacattagcacctatagaagccccttttccaattatagtttctttatactcgctttttctttcaataaagcttcttggatttactacattagtaaacacacaagacggtcctaagaatacataatcttcgcaaataactcctgtatatacagacacattattttgtatctttactccatctccaatttttacaccaggcgatattacaacgttttgacctatattacacttttctccaattacagaattactcattatatgagagaagtgccaaatcttcgttccgtcacctatcactacgtcgttatcaatgtaacttgattcatgtacaaaataattcttatccataattaaccctcgcacttatcaatattttccttaagtaaacctcaagttcaaaatatataggaatttgcatatcacaatattaatattatgcctttatattttcaactatataatttatttcattttctgttaattctggataaactggtattgcaaatgttctatgtgataaatattctgcaaccggcatatccccttctttatatcctagatctttatatactttttgtaaatgtagtgggactggataataaactccagttgctataccattttctttaagtttatttatcatatcttctctattttcgcattgtaacacatattgatgatatatagtttcattttctttatcaacagtaggtacagctacattagaaccttttaatttttcattatatatttgcgctacttctcttcttctactattccaatcatctaaatgtggtaattttactcttagaattgctgcttgaatagcatctaacctagagttgaacccgattaaataattatagtattttaaagcattatatacagtatcgtcaccatctttagacgtctctatctcatcatttatattatttagcaaattataagctttttgtccagtttctccacttccatgtgttcttaaagcttttgctattatcgctatattatcatcatttgtcactatcatgccgccatcgccagcacatgaaagattcttagttggaaagaatgagaagcatgctgcatcacctaaagttcccgccatctttcctttatatctagatcctgatgcttgagcagcatcctctacgatctttaaattgtgcttcttagctatttcatttatttcatccatcttagcacattgtccaaagatatgaactggtataatagcttttgttttatttgtaattttttcttctattttagttggatctatattaaatgtttccttttcaacatcaacaaaaacaggcgttgcacctactgctgaaatagcttcagctgaagcaaaataagtaaatgtcgaagttattacttcatctccattccctattcctaaagattttaatgcaataaccaatgcatcagttccattcgctactgatatcgcatgtttaactcctatatattctgcaaattctctctcaaattcaattacattcttgcccataatataattcgcagaagaaagcacttctttagttactctatctaaatcttcagcaatagacttatattgagcttttaaatcaattaatggaatattcattatcctcgctccttaattctactttaatatgttattaatcatcaccaatatatctccgattcaaacttctgactgacgatatcaataactaaatatttttttaattgtagtgtaaatactaaaattatatgtagatatactatttcataaaactaccatgaatattttaacatacttatttttaattcacaatgcacaatacaatctagtagcttatttcatacagctatagataatttaatatttatttataggataccactcatttggtaaaagaacactatatttattatttatatatctatcatcaataagcagaactcttcctttgtccgtctcagttcttataactcttcctacagcctgctgaattttatttattcctggaaatacatacgcatagtcataaccatcttctttataaaaatcctttataacttcatttgtcatatctaccataggatatcctactccaattattatgcttccaattaactgatcaccaggcaaatctattccttctgaaaacatccctccaagcacacaaaacattaataaattattgctattcttaaatcttcttaaaaattcacttttttcttcctccgtcatattaggtttctgtttcataagattaaattcttctagcttcgactcctccatatggctatataactcttccatatatgcatatgatggtgaaaaaatcatgtagtttccaatttgctgctttataaagccacaaattttatctttcactgatgataaggtcctttttctatatgaatatctaatattaataggactaatatgaacttttaagttttctttattgaaaggagatggaagctttagcctatatgtattatcatctccgcccagcatatttacatagtattttattggtgatatagttgcagaaaaaaatattactgagtagcatttccctaaatattctcttaaattcttagctggatttacacaatataaagtcaacttgatttcttgagaatccttttctatacaagtcctataattttcatcatagagctgtgtcgtagaagtaaaagcattcatatcaaaatataatttcaatatatcttcataaccatcaaatctatttcctcttactagcacttcttcactttcttttaagtataactgcaaatacttactcaattccttaggatgttcctcttcataaaatgatttcacttctctatggtcgcattcatttcttaaattaatgaaataatcattaatctttcccaataaagaatgtagtttatttaatttacccttagttatctttttgcaatttagaatttgacttttatataaggatgcggaatacatatttcttgatctatcaattaaattatgtgcttcatccaccaaaactatatttcctttgctttctagaactctactcaaagatactcttggatcaaagatgtaattataatcacctataattccatcacaataagtacttatatctaaagatagctcaaatgggcatacctgatatttttcggcatattccttcaatatttccgtggaaattctttcttccctttcgataacatttgtaattactttttttactttaccataatagtctttggcatatatgcacttctctggattgcaatcaaaatcatcattaatacatgttttctcttttgccgtaattgtgatagtcctaaatttcaagccttcttgacgcaatctttcaaaagtttcttcagcaacttccctatttatcgtctttgccgtcaaatatataattttttctccgattccttcgcttatagcctttacagctgggaatatggttgatatagtttttcctatgcctgtcggtgcctgaacaaataatatttcttcctcttttatagtttgatatgaaacattaataagtttcctttgaccttctctgtatttttcaaaaggaaaatttagtacttttatagtttcatctctaatgtttttccatttaaatattagaacactaaatctctcatattctcttaataaatcagatataaattcttctaattctcctatagtaaattttttttcaaaactcttaacctcattcgtttctaactgcatgtaggataatcgtacataaatttcttcaagattattttgatttccataaataaaagcatacacctttgcctgagcccaatggacctcattcaaatcatcaatgtatgcaaaattcttataagttgattttatttcttcaattataactttatctttttctgttataattccatctgctcttccttcaatatagatcaagcttttattcgtctcgaattcatgagttaaatatacttccttttcatagttctcataaacccttccgttatcttcctgaagcttttgatgtgctcttactccctctactgccctagcacttccagaaaacctattatctatatcaccttttttcaagcaaaattctactaaatttctcacagactctcgtataagaattttatccataaattaattcctcactatagttaaaatcacattttcaatattaaatcataaacatagtcataaaacacttacttaattagcctaacaaaattcaagttctaattaagtaagtgttttttagtttattgctattgtaaatattttatctcatataatttattcttcttcatactctttaactattttttgaactaactttttaataacacttgcttctgctattaaagaaagaactaataggaaaattttaattctttccttatcattatctttcaagtcaaaattctttattatatcttctaatttatcatcatttgatataaacgtatctaaatagttatccaaactttccttttgtatttgtgtgaaagttttatatgtctcttcccatgacagtatatcatcgcttctgtcattgatttcattaaatgcaagccgaaaaactttctttatttcttccgtcgttaataagggcctcatatggctaagcagtactaattgtactaaatgcatttttgtatatcctcttttttttccatcttccggcttagttataacttcgcttttagtataattttgaactatattgttagtaaacttctcatcaacaaacttatcgttcaaataatcgattacttgggataaaaacaaatcatatttaggaatatcttcatatgaaacggaagtacttttagacatttctttagccaattcttttatataatctgaatcaaattttcctgccattatcatgcacctattctttctcaatctatattatatattatatagtaatcatgaacttgttacaagttattataaacattgtaatataaaaatttttctactagtttatactcttagtataataatagtattatacgacatatctaattttttttaaatatagtattgataaaaaatatctaatttatgtaatcaatcgacattattatttatagtatttgcatttctacaaaaaaagcggacatatgccttatattactttatttgtaaatttactattatataatcatgaatataattcatatacatttctctaaccattggtacatctagattcctcaaatttattaatttggattaatatgataattttacaaataaaccctcttgacttttctaaaatatggtagtatattttatataagatgtttattaaagttgaaatttgtaatttcttataaatatttaaaaatatacattgactttatattacatacttggtaatatatcatagtagaatgtcgaatcatggaattaggaggaattttttatgaaatcaacaggtgtagttagaagagtagatgaattaggaagaatagttattcctatagaacttagaagaacattagatattgctgaaaaagatgcattagaaatttatgtagacggagagcaaataatcttaaagaaatacgaaccagcttgtatcttctgtggagatgcaagagacgtaattaactataaaggtaagaatatctgtactaaatgtttagacgaaattaaaacaaacagatagtatttgatgtattctaatttcctattatataattaattatatagtcaataaataatagactatctcaagagttaatttgagatagtctattttcttaacttaattatatattagttgagaatttatatacttcacttttaggtaattctctttccttggctacaagctttattgcctctttcttactcgcaccaccattaatatatttaactatatgctcttcaatagataaatgaatccactcttccctttgctcttcctttatctcttcaagtctttttccttctagaacaagaacaaattctcctcttggtttattctctagaaaatattgagcagcctcttttaacgtccccctatatatttcttgataaatcttagttaattctctacatacagcaatttttctatctccgaacgtatctaataagaattcaagcgtatctatcagtctatgcggtgcttcgtaaaagataatagtttcctgactttgcaataagtcatttgtgactatcttacgttctttattttctcttggtaagaaacccctgaataaaaatttagttgtgtctaatccagaataaactaatgccgtagttatagctgtcgctcctggaagtacttcgaaatttatctttttttctatgcaacgtccaacaataacacttcctggatctgatattccaggtgttccagcatctgaaactaaagcaacattattaccttccattagtaaatctataattttatcactttttatttgctcattaaatttgtgataacttattaatggtttttttatctcaaaatgatttaataatttcaacgtttgtcttgtatcttcagccgctataatatcaacatttcttaaagtttctagagccctcaatgttatatcttttaagtttccaataggagttggtactaaatacaactttccattttccatatcatgacctccaatatattgaatctatttctttagtatattttccatcttcatcatagacatacaatggtgcttcccacttcaaataggctcccccatctctttgtccttcaaccaatacaatattaggagcttttcctaccttaggatgaatcatttttactcttttcggttctattttatattttctcattaaaacaaaaatatccgctaatctttcaggtctatgtatcataaagagtcttccattatcctttaataaaattcttgctgccgaaatcacatcttctaaattacatagtatttcatgcctagctatagcaagcttatcatttggatttataattcctgaattgtttagtttataaggtggatttactgtcaccgcatcaaacttatcaagtgtctttagataatctatgttttttaaatcttcatttataaaacatacatttccttcaagctcatttaattttacgctccttttagccatatctaccatatcttcttgaatttctaatccatatacacgctcaggcttatatttgccatatatcaaaaatggaattattccagttcctgtacataaatccatcaccttatgtttgttttttatataagcaaaatcagataataaaacagcatctataccaaatttaaatccctccttcttttgaattaaatttaatcccttaagttgcaaatcatctactgtctcatcatctctcacatattgcaatttattattcatattattcttcctctacttaactttacaatattctactttaaaatatctaatatcaatatttgtatatacctaatctctaaagtatatattccacattatatcatacaagtaaaataaaaaaagtccttctgatcttttacagaaggacaataatttgaaatcagatattaacaactaatttcttatgttaactacttaagaactcttcttgcagcataaaaactataaactggcgcaactttaaccacatcacctgtttgaggtgcgttaatcatttggccattaccaacatatatcccaacgtgacctggatgagtaaataccaaatctccaggttgaagctgatcttggctaactggttgtccaactccaatttgagaataagttgttcttgttatatctactcctgcagcatgctcataaacatattgagtaaatcctgaacagtcaaaacttgcatctccagttgcaccccatacataaggctttcctaactgtgcatatgcctcatttagaatagattgagcatttcctgctgatggtacagctactcttccgcctccgcctctacttggcgttgccacttttacttcagctgcttttttatctgctaccattgttttagccttttcaattttatcatttatctctgaagtaacaatctcactcttaatttgattatctctaatatttcttaattgattaattgctccttgaagatcagtagctgaactattagagttacctataacatcaaattgagattttacaagttctctttctaattgtgataagtattgtgagtcaaatttacttttttcatccttagcttgacttgataaagtttctgcttcttttttctttccatcgagttcacttaagctaacttgtatttctttattaagtttatctatttcatctttcttatcttctaaggattttattttgttatttaattcttcctttttacttgtaacatcttctatggcagatttgtcttttcctataattttactaactgcctctgctctagaaaagaaatcacttgttgattctgattcaagtataaaattcaagtaaccaaattctaaatcacctgacatgtacatagctttaactctttgtcctaaagctaaatctaatgtattaatctctttcttatattgttcaatgtcttttgtactactatcaataactttattgatagttgttatttcttttttattcttatctactgttaattgtagcggctctatctgcatatttaaatcatcaattttattctgaatatctgttatcttgctttcaatttctgcatatttctgtcttgaatcactcaactgttgattatctggcgtcgcaaacgctggtatcgagctacctacaacgattacggttgctaacataatagctagaattctactcctcattaaatatcggttttaaaccttccctcctccattaatctatattactacataattataacaccttggataagaatgaacaattcatatatatagcgagaatttagtttatcctactattatctaaatatcgtccgtattccccactttttctagcttattctttgtgattcttattatagcttatatatataaattttcatcaataaacttaacttaacaattccagcctccctcatcacaaaattatttattctaatgactataattaacttttttctgtattaattacatcttctaaagtccttgacataagatttacttgaatatataattaatgtataaccggggtgtggcgcagatgggagcgcgcgtggtttgggaccatgaggtcgcaggttcaatccctgtcaccccgaccaaatatattattagactactataacttaaggattgatccttaagtttttttatttagtaatttattaatctataagatatatcttattactaattcttctaattcttattcgtatctaatgcttcaattataatatttattgacactaaggcacaccaatagaagattaagtttagcactaagctatatcaatatttattcgtttatataaataacaattatttggaggtgtaaaatgctaagtaatataaaaggtgtaatttttgatttagatggaactattgtagattccatgtgggtatggtctcagatcgacatagattatcttaaaaagaaaggacatgctgtacctaatgacttaaaaaacgatattgaacacttaagtttttatcagacagcagtatattttaaaaatagatttaaaattgaagattcagtagatgaaatacttagtgattggcatcatgcagcatttcatcattacgctaataatgtaaaactcaaatcaggtgtaaaaacttttttaaaatatttaaaagataataaaataaaaattgcattagcgactagcaattctatcccactgcttgaggcttgtttaaaaaacaatggggtttatgactattttgattcaatcactattactgatgaagtcgcaaaaggaaaagattgtcctgacatatatttattagcagcaaaaaagttaaatattaaacctgaatactgtttagtatttgaggatatactccctgctatgaaaagtgcaaaaaaagcaaatatgagggtgatcggaataaaagatgatttatgtttagaacctatatccgaaattcttaagtattgtgataaatatattttttcctttactgagcttttatagatattagttattataaatatttgttttatcgcctacatacgaataattagattactaaaaataattcaacattctacaatgcaaatttaagacaagctttttctcatgctgttagtatataaatctgtaacgtagggatatctgaatacatttttataacataaaatcatatttgaatattgtattatattccaaaataataacatatgaactttaaaataaaaaaataaaggtaatgtatccatcattacctttatttttgaaactatattgctattaaatagaaatttttattttctttcaactccgtatttagcttctaattccttcaatatttgatcatattttttatgttgattttctttaattaaattatctaatacactgtctttaacttcttcaaaacttttgattgaggcttcattttttgcatctactaacactaaatgatacccaaattgagttttaaccggttcagtaacctttcctatttctgatgtaaaagcagcttcttcaaattctggaaccatcataccttttgagaattcacctaaatttccaccttgttgattagatgggcatgttgaatatttcattgcagcatctccgaatgaaatcttgccgcttaagatttcttctcttgccttatttgcttcctcttcagtttctactagaatatgtctagctgaaactgttgcaggctgaccaaaagcttctttattatcttcatagtatttctttacttcttcatctgttattgttacatcactcaatactttatttattgccattgaagttataacttcctttgatatattttccatggcgtctttgtattcttgagtcttatctaattgtatttcttttccaaacttattcattaattcaaatgaaatcaattgttctaccaattgtttcttcttttcttcgctttgtaaagctcctctttgctcttgtggatatctactaattattgcatttaaatctttttctgttatttcatatcctgctgcaacagctaacactttattttccatgtgaattctcctttataatcattttatattatttttaacagtttgttatatacacttcattttaacagtatctactacttctaacaataatataactaaataaattttagatttttaatcaaaaatacatagtatacataaaaccaccataaaatgttatactaatttaggggtgatttaatgtccgatatattaaaaaatgattggaaaaattatttgcagtctgaattccaaaaagattattatattaatctaagaaaatttttaataaatgaatataactctaagaccatttatcctaatatgtatgatctctttaacgccttacattttacaccttataataaagttaaagttgttatattaggtcaagatccttatcatggacctggccaagcgcatggattgagtttttctgttaatccaggtgtaaaaactccaccatctttaattaatatctataaggaactacatactgatctaggttgctatattccaaacaatggctatttgagaaagtgggctgatcaaggagtcttattgctaaatacggtacttacagttagagctggagaagctaattcccacaaaaataagggatgggaagaattcacaaatgaggttattaaagtgctaaataaaaaggaaacacctatagtattcatactttggggtaataatgctatttcaaagactgactttattactaatcctaagcatcttataataaaatccgttcatcctagtccattatctgcatcaagaggcttcttcggaagtaaacctttttcaaaaacaaacaattttctaatttctacaaatcaagaaccaattgactggcaaatcgaaaatatataattatttaatttacttttccaatgcttacatttaaattaagcctttctattataaattaaatgtttaaatatagttttgctaaacattgtgcatatgctggtgtataattgattatacgctaattttgaggaggttgttttgtggattataaatttgtttatgagaataaagaatacgtactaacagagaataattgcgatgggatattttttgaaggggaaaatgagattacaggtctttccttagatataatattgaatgctctaaatgaaggagaagaaataagtttttcaactgaatattatggtgataaatgtacatgtaatactcaagagcaaataaataaatcttatcgttacttagagtaccacttttacatatatacaaaagataatgaatatgtaataaatactatctgtaatgaatataagaatacatcttttaataaactttttggtttaggaaaaattgatgatagctatatagttagtgtgactgtatgccctaactgcggtatctactcaatatatatagatcaatgtactgtttaaggaattcctatataacttttttacaaatagttaatataaaaaaagataacatttagaaatataatttaaatgttatctttttaacgaatataatgtattttttattcccttgaaatagtaacttaagttaattaaactattcaaaaaattgtatacagattttactgaattataattttctaaagatatagaaaaagcactaacttatgttagtgcttttttggtggctcgaactggaatcgaaccagtgacacgaggattttcagtcctctgctctaccgactgagctatcgagccatattacctggcaacgtcttactcttccacacagtctcccatgcagtaccatcagcgctgtagaccttaactttcctgttcggaatgggaaggagtgttacctctacgccgtcatcaccagatacaagtagtattatatcgagttatttatattatgtcaacacattttttatttttttattataaatattttaaaatgtttaattcatcagggtttatattttatttttctaatcaattgtgcaataattaaatatacatgataatgtgtttttaatacttaaaataaattctaatttggaggtttttctatgagcattgaaaagttatcagaaatattaaagaatagtaataatatagtctttttcggcggagctggtatcagtacggaatctaatatacctgactttagaagctcaaatggcctatttagcgagaaattaaacgctacattgactcctgagcagttagtatcacatactttttatattaaatatcctgaagaattttttaaattttacaaagcaaaacttatatatccagaagctaaaccgaatgccggccacttagcattagctaaacttgaagaactgggaaaattaaaagctatcgtgacacaaaatatagatggacttcatcaaatggctggaagcaaaaatgtatttgaacttcatggatctatccatcgaaattattgcgttaaatgtcacgaatcctatgatgtgaattttatcctacaatctaaagaagttcctacttgcactaaatgtggtggaactgttaagcccgatgtagttctttatgaagaggggctagacgataaagtaattagagaatctataaatgcaatttctaatgcagatactcttattataggtggaacttcacttgttgtttatcctgctgccggacttatcaattattttagaggaaagaatcttgtgttaataaataaaagttctacctctgctgattccaaagctaatttggttattaacgattctttcgggaaaacattaagcgaggctataaaagaattataaattttttatctaaattatgtataaataaatttaatttggcaataaataataatgaagtatttaacttcaatatttaatcgcctctcccccatttttatttatatacaatttgtaaagccataatatattacttcgtttgaaatatattatggcatttttattttgcataatttatttaataagaattcttcttagcatatctaatcctgtaattgtagcctgaagccttactttgtttctatctcccttaaacaaacatttttgtattgttacctttccttgaacatacacacctataaaaaccaatccaacaggtttttctaaagtaccaccttctggtcctgcaattcctgttgttacaatgctaacatcagtattagctgtctttgcaataccaattgccatttctcttgcggtttcttcacttacggccccatatttgtttaaaatatcattattaacgcctagtctattatgtttagcctcattggaatatgttacagcgccttctaaaaaaacttccgatatacctggataattaataagatagcttgctatcatgccaccagtacatgattctgccgtagatattgttagtttcttctctattaaaagcctagctacaacttcttctatgttaatatcctcagttgcataaacattatccccaagtctgttcttaatttcttcctcgattggttctatcaattttagtgcttcatctttagtttcagcctttgcagttatacgaagcattactcctacatcttttgcataaggcgcaattgtaggattagtttgagcatctattaaatccttaatctcttctgcaacagcgctttcccctattccaagtatcttaacaactcttgaaaccaatattgaatctgatttctcttgaagatatggtttaaccgattcttcaaacattggtttcatttcctttggtggcccaggtaaaatgatcattatcttattatcatcttctattataactcctggtgctgttccattattattctttataacagttgctccttctggaattaatccttgctttaaattatttttagtcattactctttctctaaatttaaaataatcttttatttttttaatcgaattttcatcctgaatcaattctttattaaaatatttagctgcaacttcttttgtaatatcatcatctgtaggtccaagtcctcctgtagttattatgatgtcacttctgctatatgcctcatcaaatgcatgcataattcttatttcattatctcctactacttgctgataatacatatctattccaagggctgctaattcctgagctaaatattgggcatttgaattaattatatcgcctaataaaatctctgttcctatggctataatctctgctttcatcttattaccttcttcttatttaatttgcaagtctacaataatattcttaattagaaattatactactaaaccattattaattacaataatctctatttatattataattaaagattgaaacctatccaacaatctattgaataggtttcatataaaatatattcttttataatatgctatctctaagtatatctagagatagcttatataaaaatttttttcatcccaatctattataggtaaatactttaaatatcaaaataaaagtctcattagttaagtaattaacctagaataaacttagtaatatgtatgagaagaaaaaattcattgcaaagagagctttctgttctaattttatgtgaaatttttaatctttattcacatctatctgcaattctattataaaagtctattctaaatgtttcaaagctctagggttaatctaaaaatctacactactttacttgcttcattctttatattacttatcttctgtttcaagcaatgctaatgctaccgcaccaattacccctgcatctgtacctaatcctgctggaacaatcttaactgattctgccatggatttaaaacatctcttatcaacaacttttcttactgtatcaaaaacaatctctccagcttttgatacaccaccacctattattataatttctggatcaaatatagatactgcattagctatagctattcctaaataattcagtgcattattaattatatctacgcaaactggatctcctgcagccgcttctgtaaacacctcatatgaagtaatagtatcatactttcttaatgaagtctcaactttgctagctaatgcttcctgtcctctttttgcaattgcagttcctgatgatgttgcttctacacaccctatatttccacaattacatcttggtccatctggtgccactgtcatatgtcctatttctaaggcatttgaagtgtgtcctctatatacctttccatttaagacagcgcctccgcctacgccagtgcttactgtgaagaatactacatctttagcgccttttcctgcaccaaacatatattcaccgatagctgcaacgtttgcatcattatctaaaaatacaggaacttcaaactttttatttaaaggttccactaaattaaaattcttaaatggaaggtttggtgtatagattatggttcctttttcagcatctaaaggtccaggggaaccgataccaattccttttatatctttataagttactgatccatctttaattactttttcaacagattctataattctatttaatactggaatttctccctcgcttgcatttgtaggaactgttgtttgacataacacttctccatttaaattagataatgcagtacttatcttagttcctcctaaatctactcctataacatatttttgcataatataactctcctttattttatttaatataccaataaaaaacaatttgctaatacatattatactatattatgctattccaataaaacctgtattttaaataatattttttcaagatcctttattggcgcttatgtaatagttcccaaaatcgtcatattgtgtataattgatattgaatttattatcttgaagcatagaattaattaattctatatcatccttattatttctatctatccttattacaaaattatcatctttgtctattatatttaaatagtcaaatatattactataatcactcaactctatatttccattaatatccatgctataatctgacattgtacaggcctccttgttcaaattgtataaaatatactattactaaaatattatgtctttctgcacatgattttatcctatatatattaatgtaaaatttaccttattccttaattatagtaaattttattttatttctctttattaagccaataaataaaaagtaccctttatgtaatacctacactagagtactctttattcctattccgtaaattttagctataaatttccgtaatcttattttcttaattcattaatgctctctatggctttcgctacctctatctctggaacttcttcatatcttacaaattcttttgtaaatactcctcttccttgagttaaagatctcaactcagtagcatattttctaatttcggcaagcggaatttctgatataactctttgcttgtccccttctggttccattccgattactcttcccctctttttatttatatcagctattacatcacccatatattcatttggtaatataacttctactttcattataggttccaatagaataggtttagcttgctctaatccctttttataagctatagaagctgcaaccttaaaagccatttcagaagaatctacagagtgatatgatccatcatgaagagtcgctttaagacctataactgggcatcctgctaaaactccatgggttatacactctcttaatcctttttctactgctggaataaagtttcttgggactgcaccaccaacaacgttatcaataaattctaattcttcctctccatctgttctacgttcaaatttaattaccacatctccatactggccatgtccaccagactgctttttatgttttccttgtacatctgaaaatccccttatcgtttctttataaggtacctttggtaaacttaatactgtgtctacaccaaatttactttttattttacttgcgattacattaatatgtgtttctcctagtcctgagattacaatttctgcgttttctacatctctatcaatttgaaaaacaggatcttcatcttttaacttagccaaggcttgagatatcttttcctcatcacctttagcttgagggattacagccattgagaaaactgtcttaggaaaattcattttgtcatatattactttaaaatcagaactagctaaagtatcgcctgtatttgtatactgtaacttagaaatagcacctatatcaccagctattattcttttagctggtatttgtgtcttacctctaataaaacatatatgagataatttttcattcttatctttattaacatttaatactgtcatatcatctttcgcttcacctgtaataactctaaaaaatgatatcctacctacaaatggatctgcaatagttttaaatactaatgcagaaaaaggcttatcttgattaagattaacaaaaacctcttcatcttttaaaacgtctacagctttttgtgggatagcatattctggcgatggaaaacattctacaatatcatcaattaaagaatccattccaataacttttgtagcacttccacacataacaggggcaatatctccactagcacatccacttataaggcccttatatatttcctcatcactcaattcgccttcactaaaatatttatcaagcaatacttcatcagtctcagctacagcttccataatcatcttcttacaattttcaacttcatcctggagctcttcgggtatatccaatatttttatttccttagtctttacatcgtatactcttgcttgtttggatattatatttattactcctttaaaattgtcttcttctcctataggatactgaataggcaccacgctgataccaaatttttctttaagagatgctaatactttattaaaatccgagttctctctatctaatttatttataaaaaatgttctaggcaatttaattttgttacaatattcccaggctctttcagttcccgccttgactcctgaaactccgcttacaactatcatacctacatccacggctctcattccttctatacattcaccttgaaagtctgcatatccaggaatatctataagatttattttaacattatctaattcaattggtgctactgaaagagcaatagaaaattgtctcttcttttcttcagtatcaaaatctaaaaccgtagttccatcttcaatattccctaatctatctgtaatttttgaataatacagaaggctttccgctaaggaagtctttccagttccattatgccccattaatcctacatttcttaaatttttaatactataatctttcataatgctgccaaacccttaatctaccctagagattggctcccacctgcctttcacttaataatgctatatgttatatttctatttctattcgttaaatcctccttattttcttaattttctgaaaatttatatttatcctattttggaagtagtcctttaaattaatttgatgttttcttgtagtattaaccaaaaaacattataattttatctgttaatatctttagaatcatgtttattactttaaatctatctttgtggaggaaaatttaatgaaagcaaaaaagaatttaagaaacttccatatgttttggtttgctttacttgcaatttctataactatcggagtcttatttataaaaccccaagtgggtgttgctgatcaaggtgatttctatagaattatgaatgtatctggtctgtcattattagactcagatacgaacaatcctaactctgtaggatattacgactttattgtgactgattacaagattacccctttaaacgatactgattctaaaagcatctggaattgtagtttgagctatctaataatacttgttaattatatatgcaaatcacttgatcataatatatttaaaactcaatatttagctgtcatctatagtattatatatattctttcatttatcataatattaaaatctttgaatataaaaaataatattaaatctatgatgcttgtactaataaccgcattcattttctttgatggcaattatttaatttggtttaatagcctatatggagaaccaatgatgataactacactatcattgcttgttgcatccattcttaactatattcaatacaaatacgtagtaaagggaacggaaaaattaatgtcgaaaatactttatatattattttcagcatttttatttttaggttctaaattacaggttattacttccttacctattattataattcttatatgtaaaatattattggataatagacataatttaaataaaatcagtttagctattttatatattattacatgcttattgataagctatcctattctcatcaatatgaatagcaacaacttaagtaaagatacccagtataactcagtcttttatggagtactaaacgaatctactactccagagcaggacttgatagatttaggcttagatcctgatttatcagctgaggctgggaaacatgcttatttagattctgatgaatatgtaaaatatattcctggttcagaaataactgatgaaaaattctacagcaaaataaataactttaaacttgcaaaattctatttgactcaccctactcgcttactaaatggcatgaaatataccgcaagtaaagcattttatactagtactggactaggtaagtactcaaaaactgatagttcaaccccagttagggatttccatcgtttcacactttggtcatctataagggaaaaaatattacctagaaatttatattttataggattaatttatcttattgttctgttatgctcactgtataaatatattcgaaatagttctaatcctgaaatcaagaacaaaattttcttgctttggactgttatatttataggtatacttcaatttccaatgccttttgtaggcaatggaaaggctgataccgcgaaacaattatttttgttcaacttcacttttgatggattattaatacttattcttgtttatattctatttaaagtaaatgatttatttaaaataaaatttaattcatctcataaataggtttaacaagtacttttaaagtaattgtaattttgtttactctaattaaaacaatatctatatttgtttctcactaactcatatttatgtttgcataacacatatttaatttctgttatagaaaatgaaagctaagtacacaatgcttaatttgcattatatacttagctttcaaaatttttatttactttttattccttattttcataccttaatataattaactgatttatattattttaaaattcaattgattaatttggttttaatcttaaattactatatctaaattattcaaattatcttttatttaccttcattaaaattggcaactacatacattctaaatagattaatcaatattagtgtaatacccccaactgtatctattataacatctctaaaagcaccttctcttcctaaaacaaataattgatgtatttcatcagaacaagcataaaaaaatacaaaaactactgtcacaaaaataactcttctgatgttaaaatacaatttaaacacattaaatgctagtaatgataacaccatatattcaagaaaatgtgcacattttctaactataaaattagtaagctgcccaaagattccattcatattgatacctatagcagaaagaatatttattacgccttcactttgagaatcagatatttgagcaggttgattagacataataaatatccctatcatccaaactattaataaaaaccagtaaataattttccttttgttcttcatattccatcctctttaagtacaattttaaaattcacagatattatattactcagacatatatctatttatataagcaagtgattcttctaataattcttgccctttttccaaaccatcgattttcatctctaagctacaaattctttgatcaatttgatacataaactgctttatatcttgtagtaactttgcttcataagtaacttgaacaccttcatcatcaatgtatattttttctggtggagcaccacacttagaacacttagcatatattccttgtttatctaaattattaaacaccttaaatgtatcgttattacactctgcacaatttgataacattataaattcataataactcacatcataataataagtacttccacagtctttacatactaatttaagtttattgtcttctgttgatatatgaaattcattaccgctacatccatcttttttgcagacaatagttcttaccataatcctacccctcgcaatataatttttatacaataaataaaaatatcaaattacatttttacatatattttacatataaattatatattataattcattcattgtatactttaacaattagtatttttagcctattttatactgttgttctactattttctgcaccatataactcataccagtaataaatattatttaacaacaatatttataataataaaacaaaaaaactatgaataaaattcatagtttttaatggtggagataaagagattcgaactcttgaccccctgcgtgcaaggcaggtgctctcccaactgagctatacccccatggtggaccttcagggactcgaaccctagacctaccggttatgagccggttgctctaaccaactgagctaaagatccgtaagttaaatttctttaacttaactcttgtaatctacaagattacctcgcaacgtcctactctgccacacagtctcccatgcagtaccatcggcgctatagaccttaactttcctgttcggaatgggaaggagtgttacctctatgccatcatcacgagatcttcaatttgaaaaaactttgttctttcaaaattgcacacagtttctttaatgtatttacaatttgactatattggtcaagccctcgacctattagtatcagtcagctaaatatgttaccatacttacacctctgacctatcaaccttgtagtcttcaaggggtcttactagcttatgctatgggaaatctcatcttgaggtgggcttcacacttagatgctttcagcgtttatcccttcccgacttagctacccagctatgcttctggcgaaacaactggtacaccataggtcagtccatcccggtcctctcgtactaaggacagctcctctcaaatttcctacgcccgcgacggatagggaccgaactgtctcacgacgttctgaacccagctcgcgtgccgctttaatgggcgaacagcccaacccttgggacctacttcagccccaggatgcgacgagccgacatcgaggtgccaaacctccccgtcgatgtgaactcttgggggagatcagcctgttatccccgaggtagcttttatccgttgagcgatggccctcccacgaggtaccaccggatcactaagcccgactttcgtccctgctccacttgtaggtgtcgcagtcaggctcccttctgcctttacactcttcgaacgatttccgaccgttctgagggaacctttgggcgcctccgttacattttaggaggcgaccgccccagtcaaactgcccacctaacaatgtcctgtcaccagtttcatggcatccagttagaacttcaatactatcagggtggtatcccaacaacgactccaccaaggctgacgccctagtttcccagtctcccacctatcctgtacagacaataccgaaattcaatgctaagctacagtaaagctctacggggtctttccgtccaatcgcgggtagcgagcatcttcactcgcactacaacttcgccggatttgcagttgagacagtgcacaagtcattacgccattcgtgcgggtcagaacttacctgacaaggaatttcgctaccttaggaccgttatagttacggccgccgtttactggggcttaagttcacaccttcgcaaaactttgctaagtgttccccttaaccttccagcaccgggcaggcgtcagcccctatacatcagctttcgctttagcagagacctgtgtttttgttaaacagttgcttgtgcctattctctgcggcctgatttctcaggcaccccttctcccgaagttacggggtcaatttgcctagttccttaactgcaattcttccgtcggccttaggattctctcctcatctacctgtgtcggtttgcggtacgggcactacttctctctctagatgcttttcttggaagcatggaatcagatacttcggttccgtagaaccttccccatcacgcctcagaattgttggaacggatttgccaatcccaactccctaaacgcttagactagcatccaatagctagcacatcctatccttctccgtcacaccatcgataataacgattatagtggtattggaatatcaaccaattgtccatcgactacgcctttcggcctcgccttaggtcccgactaaccctgagaagacaaactttactcaggaaaccttagatattcggcctgtaggattctcgcctacatctcgctactaatgccaacattctcactcgtaatcagtccaccgctccttacggtacgacttcagcccgattacgacgctcctctaccgctcacgttaaacgtgaacccgtagcttcggtggtaagtttgagccccggacattttcggcgcaggatctcttgactagtgagctattacgcactcttttaatgagtggctgcttctaagccaacatcctagttgtcttagaaatcccacatccttttccacttaacttacactttgggaccttagctgacgatctgggctgtttcccttttgaccatggaacttatctttcatagtctgactgccggactgatagtatgtggcattcggagtttgataaggttcggtaagcgctatgccccctagcctattcagtgctctacctccactactcacattttccgacgctagccctaaagctatttcgaggagaaccagctatatccgagttcgattggaatttctccgctatccacagctcatcccatgctttttcaacagcaacgtggttcggtcctccacgaggttttaccctcgcttcaacctggccatggataggtcacccggtttcgggtctacagcatgcaactagtcgccctattaagactcggtttcccttcggctccgtaccttaagtacttaacctcgctacataccgtaactcgttggctcgttctacaaaaagcacatcatcacacacataaggtgctctgatcggttgtaggcacatggtttcaggttctatttcactcccctcccggggttcttttcacctttccctcacggtactgcttcactatcggtcatcaggtagtatttagccttgggaggtggtcctccctgcttcccacaaggtttcacgtgtctcgtggtactctggtgcagaactgattatcatagttttcacttacgggactattacccactgtggtccaactttccagttgtgttcaattaactatgatttctcgttatgttctgtccgcaaccccagagataaatctctggtttgggctctttccttttcgctcgccgctactaagaaaatcgatttttctttctcttcctccaggtacttagatgtttcagttccctgggtataccttcataaagctatgtattcactttatgatacatggggtttcccatgtgagtttcctcattcggaaatcttcggatctctgactatgtgcgtctacccgaagcttatcgcagcttatcgcgtccttcatcggctcctgatgccaaggcattcaccatgcgccctttgtagcttgacctaattattagtcatatcacaaagaatatttattcttggctttgttgtattttatatacattaaatctatgtgcaattttcaaagaacattgaaagacttagtctttcaaaattgaacagaacaaatacttaagtaacctttgagcaagtattttatattttgatacataataatgtatctgtactagtcagacatcatgctgatctagatttctccatagaaaggaggtgatccagccgcaggttctcctacggctaccttgttacgacttcaccccaatcgctgaccctaccttaggtcgctgcctcgcttgcgcgttagctcacgaactttgggtattgccaactctcatggtgtgacgggcggtgtgtacaaggcccgggaacgtattcaccgcgacattctgattcgcgattactagcaactccagcttcatgtaggcgagtttcagcctacaatccgaactgagactggttttaaagtttggctccacctcgcggtttagcatctctctgtaccagccattgtagcacgtgtgtagccctagacataaggggcatgatgatttgacgtcatccccaccttcctcccggttaacccgggcagtctcgctagagtgctcaactaaatggtagcaactaacaataagggttgcgctcgttgcgggacttaacccaacatctcacgacacgagctgacgacaaccatgcaccacctgtcttcctgccccgaagggcttccccgattaagggtaattcaggagatgtcaagtctaggtaaggttcttcgcgttgcttcgaattaaaccacatgctccgctgcttgtgcgggcccccgtcaattcctttgagttttaatcttgcgaccgtactccccaggcggaatacttaatgcgttagcggcggcacagaggtcatgacaacccctacacctagtattcatcgtttacggcgtggactaccagggtatctaatcctgtttgctccccacgctttcgagcctcagtgtcagttacagtccagaaagtcgccttcgccactggtattcttcctaatctctacgcatttcaccgctacactaggaattctactttcctctcctgcactctagatatccagtttggaatgcagcacccaggttaagcccgagtatttcacatcccacttaaatatccacctacgctccctttacgcccagtaaatccggacaacgcttgccacctacgtattaccgcggctgctggcacgtagttagccgtggcttcctcctcaggtaccgtcattatcgtccctgaagacagagctttacaatccgaagaccgtcatcactcacgcggcgttgctgcatcagggtttcccccattgtgcaatattccccactgctgcctcccgtaggagtctgggccgtgtctcagtcccaatgtggccgatcaccctctcaggtcggctacgcatcgtcgccttggtgagccgttacctcaccaactagctaatgcgacgcgggtccatctcatagcggattactcctttaattgctatgccatgcggcactacaatcttatgcggtattaatcttcctttcgaaaggctattccactctatgaggcaggttacccacgtgttactcacccgtccgccgctaatccgctcccgaaggagcttcatcgctcgacttgcatgtgttaagcacgccgccagcgttcgtcctgagccaggatcaaactctcaataaaaagtttaatcttagcttactcaaataaaaattgctggtttacttaaatgtatttatcttattctgttcaattttcaaagaccaattttctttcctacaattctcattgtagctattaatttatgtcaccctcaagcgacttatttagtatatcatctgctttacatactgtcaataactttttaatttttttgaactcaatcagaaaagtttttcttagttcaattgaagttatttatgtacttcagcgacgtttattatattaacatatatgataattgtcttattatattaaattatcctattaaatgactttatattcattatagtctaaaattcacgtaaaattctctctaattctattagtgatacactaggaatagttatattatataacatatagcttttactaactttcctttatttccattatgtttaagtacaacagcttagcgcatttgatataaaaaaagcaaatttcgcttacaaatattttggtaaacaaaacttgctttttttaacttatcttatatatcaacttatatcatttccaaaattagttgcttattaatagcttatttattgttataccctatcttctctagaataattaaagcagtatcttcaatagctctctctgtaacatctatagtcttacatcctatttttctcattattttatctgcaaaatcaagttcttctaacactcttgcatctcctgcatattcaatgtctgacgtaatcctatgaaacttatctaaccttcttttccttatttcaattaatctaagtggatttattgttaatccaaatactttttttctatcaatttcatatatttcatctggaactcccacttcaggcattaaaggaatgtttattgcctttacccccttattggctaaatacatacaaagtggtgtttttgaagttcttgaaagtccgatcaacactacatcggcattctttaatcccctataatctttactatcatcatattgcatagcaaattccatggcttctattctcttgaaatatacttcgtctgtttgcctcatagcacctgggttgtatgtaggatgtgtatttaatatagttgatgccacatttattattggccctaatacattcataaccgatatatttttttccattgctttttgtgtcaaatgctcccttacattaacagtaattatagtagatacaattatcacgctctcgcactcatttgcaatattcattacatcttcaacatcttctaaagattttacatatggaattcttttaacatctactttttctgtaaattgacttgccgctgcaacagcaacttggtttgcagtttctcctatcgaatctgatactgctaaaattgttaacatatttataccttctttctcataatctcatgatactttttataccttactctttttttataaatatataccctgaccaatgcttacaatactttaattaattatgtatgtgttcctgttatctctatattaaactaaatttggttcatttaacagtagtgaatttttttttactatatgttacactttagtataacgtaatacaattacagttggaggtactcttatgaaaaataaaaaagtgttaactataagtattcttcctttgatgtggactatatatgtcttattcgagcttattactggaagaattaatgatcttagaacaattttatttaatatgatactaattatattatttgcactagtaggtctatttagctacataatcggaattaaatacgaatgtggatttaagtctaatacacttgtaattctatttttctttctttttctatttgatcaaggaataaagatattaataaaactcttttggtttaataatgattttcctataatatctagcttgttatattttcgacctataattaatactgaaggttcttggctaaatgctagatttggagcatccgttaattttcctattttaataactataaatatatttgctatatttatttttatcgaagtatatagatattatttatacaaaggaaacaaggatttctgggccgatatgtgctttatttttgtatgctgtggtgctacatgttcgctgattgacaagattttttatggtggtagtttagattttataggaataagtaatttattcattgctgatataaaagacttatatattaatataggaatattattctttgcccttactatgtttaacaatggataccttgcatctaatgaagatacatcagttaaggaagatattcaatcattaagaaagtttttcttatttataaaaaaggatatctcgcataagttcaaatccttctaaacagttatctattagattagtaaaacctatgaatacttatttaatgttattcattttataaatttgtaatatgatatgtttcaaaatttataaaggtaaataaaaaaaagagttttactttcagtaaaactcttttatttatataaatactaagcaagtttttcaataagattacttttaataaagtaattggtggctcacccgggaatcgaacccgggacaccatgattaaaagtcatgtgctctaccgactgagctagtgaaccatcttacctcgcaacgtcctactctgccacacagtctcccatgcagtaccatcggcgctatagaccttaactttcctgttcggaatgggaaggagtgttacctctatgccatcatcacgagattttaattaatagttgatacaatcttcatctattacttcaaatttatgaaataatctttatataactattttataatatcttgtcgaaaacttgtctcaacaagatattattatacatagtattatctattatgtcaacacttattcagaaataaaacttattttatttttttggtatattcttttattaactctatagatcttttaaacttgctcaactcttcttttgtcatatgaatttccactacctctttaaccccatcagcatttaaaacagcaggtactccacaaaaaacatctttttctccatactcgccatctaataatgtagatactggcattatcttgttttcatcatttattatcgcttttatgactcctacagctgctgttgctataccataatacgttgttccttttctattgtacacttcccaacctgctctcgctgtttctagtactagtttatctaagtcaacttttcctactctatctttattgtcttttaatatctcgtagaatgacttccctccaactgtaacatgagaccatgggaccatctgcgaatctccgtgttctcccatagaatatccttgcacactacgcggatccacatttaatagttccccaatgaaattttttagtcttgctgaatcaactgaagtaccagtgcctataatatgactctttggtagcccagatatcttataaacatgatatgctatcatatcaaccggattggaaataacaataaagtgtcctttaaatccactcttcattattggccttacaatggattctactattttagctgataattctagtgtatctaatctagtttgcccttgcttaggcggtgcaccagctgttattaccacaatatctacatccccgcattgctcatagttccccctgacaattcttatatttctattcaaatattcaatacaatgatttaaatccattacttcccctagagccttttcttcatttatatcaatcattaatatctcatcacataccccttgagtcatcagactaaaggctgtactagaccctactaatcctgttcctataatagccactttacttttttttaaactcatatttaactccttttaagaaacttattcttactcatattattattattttacactcatttattcacttataattacgtatatatgaacgattaaatattatggattatattatacactatcttaactctcttctaagaatataaaatcagtcttcgtattcaaaatttatctaattaataaattaatccaatcttttattcctaaatgtttataatactgaaaataaattacttctttaataatttattttaaaacaaaaaaggttgttaataaaattaacaacctttgttatggtgcgtcatcagggattcgaaccctggacaccctgattaagagtcaggtgctctaccaactgagctaatcacgcaaatcttacctcgcaacgtcctactctgccacacagtctcccatgcagtaccatcggcgctatagaccttaactttcctgttcggaatgggaaggagtgttacctctatgccatcatcacgagatcttcaatttgaaaaaactttgttctttcaaaattgcacacagtttctttaatgtatttacaacttgactatattggtcaagccctcgacctattagtatcaatcagctaaatatgttgccatacttacacctctgacctatcaaccttgtagtcttcaaggggtcttactagcttatgctatgggaaatctcatcttgaggtgggcttcacacttagatgctttcagcgtttatcccttcccgacttagctacccagctatgcttctggcgaaacaactggtacaccataggtcagtccatcccggtcctctcgtactaaggacagctcctctcaaatttcctacgcccgcgacggatagggaccgaactgtctcacgacgttctgaacccagctcgcgtgccgctttaatgggcgaacagcccaacccttgggacctacttcagccccaggatgcgacgagccgacatcgaggtgccaaacctccccgtcgatgtgaactcttgggggagatcagcctgttatccccgaggtagcttttatccgttgagcgatggccctcccacgaggtaccaccggatcactaagcccgactttcgtccctgctccacttgtaggtgtcgcagtcaggctcccttctgcctttacactcttcgaacgatttccgaccgttctgagggaacctttgggcgcctccgttacattttaggaggcgaccgccccagtcaaactgcccacctaacaatgtcctgtcaccagtttcatggcatccagttagaacttcaatactatcagggtggtatcccaacaacgactccaccaaggctgacgccctagtttcccagtctcccacctatcctgtacagacaataccgaaattcaatgctaagctacagtaaagctctacggggtctttccgtccaatcgcgggtagcgagcatcttcactcgcactacaacttcgccggatttgcagttgagacagtgcacaagtcattacgccattcgtgcgggtcagaacttacctgacaaggaatttcgctaccttaggaccgttatagttacggccgccgtttactggggcttaagttcacaccttcgcgttaccactaagtgttccccttaaccttccagcaccgggcaggcgtcagcccctatacatcagctttcgctttagcagagacctgtgtttttgttaaacagttgcttgtgcctattctctgcggcctgatttctcaggcaccccttctcccgaagttacggggtcaatttgcctagttccttaactgcaattcttccgtcggccttaggattctctcctcatctacctgtgtcggtttgcggtacgggcactacttctctctctagatgcttttcttggaagcatggaatcagatacttcggttccgtagaaccttccccatcacgcctcagaattgttggaacggatttgccaatcccaactccctaaacgcttagactagcatccaatagctagcacatcctatccttctccgtcacaccatcgataataacgattatagtggtattggaatatcaaccaattgtccatcgactacgcctttcggcctcgccttaggtcccgactaaccctgagaagacaaactttactcaggaaaccttagatattcggcctgtaggattctcgcctacatctcgctactaatgccaacattctcactcgtaatcagtccaccgctccttacggtacgacttcagcccgattacgacgctcctctaccgctcacgttaaacgtgaacccgtagcttcggtggtaagtttgagccccggacattttcggcgcaggatctcttgactagtgagctattacgcactcttttaatgagtggctgcttctaagccaacatcctagttgtcttagaaatcccacatccttttccacttaacttacactttgggaccttagctgacgatctgggctgtttcccttttgaccatggaacttatctttcatagtctgactgccggactgatagtatgtggcattcggagtttgataaggttcggtaagcgctatgccccctagcctattcagtgctctacctccactactcacattttccgacgctagccctaaagctatttcgaggagaaccagctatatccgagttcgattggaatttctccgctatccacagctcatcccatgctttttcaacagcaacgtggttcggtcctccacgaggttttaccctcgcttcaacctggccatggataggtcacccggtttcgggtctacagcatgcaactagtcgccctattaagactcggtttcccttcggctccgtaccttaagtacttaacctcgctacataccgtaactcgttggctcgttctacaaaaagcacatcatcacacacataaggtgctctgatcggttgtaggcacatggtttcaggttctatttcactcccctcccggggttcttttcacctttccctcacggtactgcttcactatcggtcatcaggtagtatttagccttgggaggtggtcctccctgcttcccacaaggtttcacgtgtctcgtggtactctggtgcagaactgattatcatagttttcacttacgggactattacccactgtggtccaactttccagttgtgttcaattaactatgatttctcgttatgttctgtccgcaaccccagagataaatctctggtttgggctctttccttttcgctcgccgctactaagaaaatcgatttttctttctcttcctccaggtacttagatgtttcagttccctgggtataccttcataaagctatgtattcactttatgatacatggggtttcccatgtgagtttcctcattcggaaatcttcggatctctgactatgtgcgtctacccgaagcttatcgcagcttatcgcgtccttcatcggctcctgatgccaaggcattcaccatgcgccctttgtagcttgacctaattattagtcatatcacaaagaatatttattcttggctttgttgtattttatatacattaaatctatgtgcaattttcaaagaacattgaaagacttagtctttcaaaattgaacagaacaaatacttaagtaacctttgagcaagtattttatattttgatacataataatgtatctgtactagtcagacatcatgctgatctagatttctccatagaaaggaggtgatccagccgcaggttctcctacggctaccttgttacgacttcaccccaatcgctgaccctaccttaggtcgctgcctcgcttgcgcgttagctcacgaactttgggtattgccaactctcatggtgtgacgggcggtgtgtacaaggcccgggaacgtattcaccgcgacattctgattcgcgattactagcaactccagcttcatgtaggcgagtttcagcctacaatccgaactgagactggttttaaagtttggctccacctcgcggtttagcatctctctgtaccagccattgtagcacgtgtgtagccctagacataaggggcatgatgatttgacgtcatccccaccttcctcccggttaacccgggcagtctcgctagagtgctcaactaaatggtagcaactaacaataagggttgcgctcgttgcgggacttaacccaacatctcacgacacgagctgacgacaaccatgcaccacctgtcttcctgccccgaagggcttccccgattaagggtaattcaggagatgtcaagtctaggtaaggttcttcgcgttgcttcgaattaaaccacatgctccgctgcttgtgcgggcccccgtcaattcctttgagttttaatcttgcgaccgtactccccaggcggaatacttaatgcgttagcggcggcacagaggtcatgacaacccctacacctagtattcatcgtttacggcgtggactaccagggtatctaatcctgtttgctccccacgctttcgagcctcagtgtcagttacagtccagaaagtcgccttcgccactggtattcttcctaatctctacgcatttcaccgctacactaggaattctactttcctctcctgcactctagatatccagtttggaatgcagcacccaggttaagcccgagtatttcacatcccacttaaatatccacctacgctccctttacgcccagtaaatccggacaacgcttgccacctacgtattaccgcggctgctggcacgtagttagccgtggcttcctcctcaggtaccgtcattatcgtccctgaagacagagctttacaatccgaagaccgtcatcactcacgcggcgttgctgcatcagggtttcccccattgtgcaatattccccactgctgcctcccgtaggagtctgggccgtgtctcagtcccaatgtggccgatcaccctctcaggtcggctacgcatcgtcgccttggtgagccgttgcctcaccaactagctaatgcgacgcgggtccatctcatagcggattactcctttaattgctatgccatgcggcactacaatcttatgcggtattaatcttcctttcgaaaggctattcccctctatgaggcaggttacccacgtgttactcacccgtccgccgctaatccactcccgaaggagcttcatcgctcgacttgcatgtgttaagcacgccgccagcgttcgtcctgagccaggatcaaactctcaataaaaagtttaatcttagcttactcaaataaaaattgctggtttacttaaatgtatttatgttattctgttcaattttcaaagaccaattttctttcctacaattctcattgtagttattaatttatgtcaccctcaagcgacttatttagtatatcacttattttatattatgtcaatagcctttttcaaaatctttaaaatcatatttaagatacaaatctgcgatttatcattaagttatttacatatctcagcgacgttatttattttaacacgttcccgttatgctgtcaacatatttgttaaaatattatgtgatgtgcatactgttatccccttattacaaattagcaatgagattatacggcttaatacttataataaattccagattaaatttactttctaaatttctctaagactaacagttctgtgtcactatatcatgtttatactataaatttatacttctattagttccataaataaaatagtaatccataatgtataaagtttttaacataccttatctatcacataatagacatattaaagttgtattgatataaataaagtaagcatcataaaattatactttgctaacattatttcttagttgttaatcactatatcgttcaaattctgcatttaattttcctaatatagataatactaacttaatgaatcacaaatctaattttctgatacttacctaattaatattttataataatataactattcaatttctaaaaatagtatcttctatatatctttacttagtaatactactttttttctttataaccaaaggatacataactgatccaataagggtctcaccacttcttatctcgctacctttatctgcaattacattatccaatactgcatcgtcaccaattctgctattttgcattattatacaatcttttaactttgtattttttcctatatatactcttctgcctattatgcaattttcaatcgttccttctattctacaaccatttgctattattgagtttataacactgcttgtatctgcatagtgagttggagcttcatctttagtttttgtatatataggtctttcatcattaaaaatttctttatttacttttctatttaaaaatcccacattgctatcatataatgccttaatggaatttatacaatctaaatgtcctttgaattcgtaagcacttgctgttagtgtatttaaattattatgaatatactctttgacctttcgatacattccactgcttacacattcatttacaatatttataaataattcagtttttaatatatacatctccatattaatatttgccttcggacttttccctatattttctcctacacttataacgcttcctgaatcatcaaagtttaatacgccacaatcaccaaaagcttcatctgcattgtttaccttcttatataccattgtaatatctttacctgtactcttatggtattccaaaacttcattgtaatctatattacaaatcatatagcttggtgctaataatacatactctcttctactatgtgttaaaaattgtatgttttcagcgaaattatggacatcatcataaacaggctcgtcatttccaaagttaaaaacttttaatccatctttttttctatttaagtcccatggtcttccatttgttaaatggtctattagagaccttgacttattctttgtgaatattcctatacaattaattcctgagttagtcatatttgataaaataaaatctataattctatatcttgctgcaataggaactgaagcaagagatctattaactactaattcacccattctgttttcattttcatctaagttgattataccaatacaatttttcatttctttctcccccttagtgatctcgctaaactgctttattattttctataactgtacccatttttacttcttcttttgctgcaataatagctatttcatcacctaaagaaatcttacagtcttttcgaactattgctccgcttccaacaattgctttttcaataactacattatcacctattttagcatccgtcataattattgaatctcgaacaactgagttttttcctatttgaactccttgaaataatattgagctttccacttgtccattaacaacacaaccttcaacaactaatgaattagatacttttgcattctcgcctatatattgtgccggccttactggattgactgaatatatcttccattcctcatcatgtaaatcaagttcattatcttctcttatcaaatccatatttgcttcccataggctatctatagtaccaacatctttccaatatcctttaaatggataggcaaccattttattcccattaccaagcatacttggaattatattcattccgaagtcattttttgatgtcttgtccgattcatcctctctcaaatatttttttagagttttccaattgaaaatatatattcccattgatgctagattattttttgggttttttggtttttcttcgaattcatatattgataaatcttcccttgtattcattattccaaatcgagatgcttcatccattggcacttcaataacagctatagttgcctctgcctgtttttctttatggaaatctagcatctttgtataatccatcttatatatatgatctccagataaaatcaaaatatattctggatcatatctatcaacaaattctatattttgataaattgcatttgcagtacctttataccactctccgcctttttcttcttgatatggtggcaatacatgtacccctccatgagccctgtctaaatcccatgcttctcctatgccaatatgtgcatttaattctagcggtttatactgcgttaatactcctactgtatatattcctgaattcgaacaattgcttaatggaaaatctataattctatattttcctccaaacggtactgctggtttagccaatttttttgttaatacccctaacctcgatccttgtccaccagccaatatcattgccacaatttcatttttacccataatattatctcctctcatatgtgtttgttctcattagataaattttatattatatgctcctatgttcaaaaaaaatgattattattacatttttatttaagtgaacttgcagaagcatattatatttttaataattattttataatatgattacccctggaatttatatttatagttttgcatacaatatattatacatttattttccattaaattccacataagcatatatcaaaatatttgtcaattttttattatataatcaaactcaatgaactagatcctacgcaatattttcaaatcatatggaaagatagttataacgctatcacttcctgcaaacttatacttttcactaatatcaagtaaattcacataatctccacttaagttaatttctttaattaatttagctttgcttgaaacatttactaatactattacgctttcattttcatattttctttcaaacgcaaatacgtttggatcagtttcaaagatacttaacttccctttttttaaaccatcttcattatttcttattttaattattttatggtagaaatcagcaagcattttgttctctttcccccatggatagcttctcctattatcaggctctcttccaccttttatgccggcttcatctccatagtatattagtggtactcctggcaaagtaaattgaattgctataagtaattttaacagtgatatattttcatccagaacagttaaaattctttctgtatcattggtacctaaaatatttatatttccataaaaactttctcttggataattctcgtacaatgacataattttttgtcttaacttatctgactttatataccccttgataaaattaattaaactttcccttaagggataattagttgcagcttgcacttcattcccttgtaaatattttcgtcttcttgaataacttatcttattagatgcgtcttcccatatatcacctaaaagtacagtatccttatttatttctccgattttctttcttattagttctataaattcatctggaagctcatctgtcacatttaaaaaccatccgctaactcccatatctgtccacttatttataatagaattatctccacttataatatagtcaacatattctttttgcatcgagttaacattcggtctatcatccattccccaccaagattcatacctatatggatatgtaataaatttataccaatcataaaatctagagtttggtgaattatacgctccaacatcgtcgtaatttcctagtttattaaaatatttactatcggagcttgtatagctcagtacaatatctagaataattttaattcctttactatttgccactttacataattctctaaattcaccatttgtaccgaacatttcatctacaatttcatagtccgctgtatcatatttatggcaactaggggatttaaatattgggcttaactttattatattagctcccaattcctttatataatctaatttctttattatcccctttagatttcctccataaaaatcccacctagcaatttttccaaaactatctctaatatacataggactatcatcccatcttccgtatataaatgagtttccttttatattatctataattttattttcatttccattatagaatctatctattagaatatgatatattacaccctctttataccatcttggtacgaatgacttttcatatacagttatttgatatggcacaggattataagtatatatttggccaactcctcccaagtgattgtcattatttccataatatactctgtcatacccatctattaaaataaaatagtattctaatatccccaaagcatcagatgtatcaatttctacagaatatttaaattcaccattatttaaatattccttgttcattcccatattcattttagttccatcgaattttatcaattcgattgctacaattatgtctttattaatattaatagatatcttaaccttttgaccagcctctacagcgccaaagggccttctaaatcttatgctttgagagtcatgtaatacctgtatatcattcattcagttaatcctcctatagattcttatagattacctctgatccccaaatccctgttgcatattcttctattgttctgtcagatgagaatatccctgaatgtgcaatattaattccacacattctttgccacttactagcattcctataaagagtatcaatcttatcttgagcttttaaatatgagtcaaaatcttgtaaaacaaaaaactcatcattataatttattagattttcatatatacttctaaatttatttttatcactatgatattttccgtttattaaatcatcaattaccctttttactctaatatcattgttgtatatatcaatagatttatatcctccatttttgtaataattcaatacttcatctgcagttaatccaaatatcactatgttatcatctgtaacttcatcttttatttcaatatttgccccatctaatgttgctactgtgatagctccgttcatcataaatttcatatttgatgttcctgaagcttcttttgttgtcgttgagatctgctcacttacatctgtccccgggattatttgttcagctagtgaaactctataattttgaatgaaaacaacttttatcttttcatttactctagaatcattatttattttgtttgcaacacaatttattaattcaatagtatttttagctaaataataacctggtgcagcttttcctccaaagatgaatgtccttggaactatatcgtaattaggatcatcaattaatttattatataaatccattattcttaaacaattaagtacttgcctcttataagcatgtattctttttacttgaacatcaaatatagaatcaggatccactcttacattatcattctctaatattatacttgctagcttttctttgttaaattttttaatttttcctaactgttctagaatcacttcatcatacaaatgcctctcaaagttctttagatcaagtggatgtcttataaagctatctccaattgtatctttaattagttttgtaagctctggattactttttaaaagccatcttctatgagtaattccattagttttattattgaatttatttggataaagataatagaagtctgtcatctcttttttcttcaatatttctgtatgaagttttgctaccccatttacactatgactgcctacaatcgctagatgtgccatcttgacttgctcatcagctattatcgccattcttctaactttttcaaggttgcctggatatttagttaaaagttctgcacaatatcttttattaatttcttcaacaatcatatatattcttggaagcaatttttgaaacatatctattggccatttttccaaagcttctgccaaaattgtgtgattagtgtacgatattgtattagttgttattctccaagccgtatcccattctaacccttcttcatccaataatattctcataagttccggtatcgcaagtgtaggatgagtatcatttatatgaatcgctactttttcatctagtaacaatatatcttttccatgctttttacagtgccttataatgctttgaactcccgctgaaacaaagaaatattgctgctttaatcttaacattttaccttcataaaatgaatcttctggatacagcacttgcgaaattgattcaactgaatttttatacttaattgcttggagaaaatcacctctactaaatgatgaaaaatcaaactcgtttgaaaccgcctccgcactccataatctaagggtatttacaatttcattttcgtaccctacaattggagtatcatatgggactgccaatacaggctcataatttatatgcataaagcttaagcgtccatttatttcgcttacttttatttctccaccaaacttaacaatttctgctttttctgcttttctcttctcccagacgtttcctagctttaaccaatcatcagatacctcaacttgttttccgtctataattttttgctgaaaaaatccatatttatatctaatcccacacccgtttcctggaatatttaaagatgccattgaatccaagaagcatgctgcaagtcttcccaatccaccattacctagtccttggtcttgctccaagttttccaactcttctaaatttatatttaaatctgataacgcttctttacatatatctcttatgcctatatttaataaagcatctccaagtaaccgtcccagtaaaaattccatagaaaaataataaacttgcttctccccagtcttattatattttttatttgttttaagccaagttcttgtaacataatcccttactaagcttcccaaagcatcatacttttgttgattagttccttcttttaactcaataccatgcatttctaaaaacttatttacataagcttttttaaatgtttttttatccatttcgagcattgatataccccctcataacattatgtcctcatcttaatcttgtcctgttaattctctatataaatctaaatatatttgagctgacctattccagctattatcagaattcattgcattttcgattagattttcccacttacccttatccttatatatccataacgcatattctattatattgtataactcatctgaattgtaatttctgaaactaaacccattaccttctccagtatactcattatatgcagttattgtatccttgagtcccccagtttccctaactataggaatagaaccatatctaagtgctattaattgccctaatccacatggttcaaaaagtgaaggcattaaaaacatatcacatgctgcataaattttatttgctaacccattatcaaatttaatattagcagacaccttatttccatatctagaatctagccatttaaaatgttcctcataatgcttatctcccgttcctagaataactagttgaacattttcttgtaatagtttatcagaaatatttactaatagatccattcccttttgacttgtcaatctagttaccatcgccagcattggtatatttttatcaacagttagccctagctctttttgtaactccgtcttgtttattgctttatcttcaatagagtttatactatagttctttttaataaatttatctgtcttcggattaaattcatcataatctataccatttgttattcctcttaatgcataggacctctctcttaatactccatccaatctttgaccatactcaggtgtttgtatttcgtatgcataagtattactaacagttgtaataacatctgaatagcataatccacccttcatataacttacgccatcatcaaattttaagcatgtgttattataaagctccatatcaaatccaaataactccggtaatatttgaggatcaaatactccttgaaatgctatattatgaattgaatatacgcatttcatcttccaatagaacatatcatttcttttatattcaaattttaatagtacaggtaacatcccagtttgccagtcattgcagtgtataagatctggctgccaatctatttgcctcaacatgtctaatacggccctatcaaagaacgcaaatctctctgcatcatcatagaatccatagacttcatctctcttaaaatatgcttcattatctaaaacataatatgttactccattatgaaagcattcccatacgccacaaaattgttctctccatccaactttaacattaaaccatttaacaaaccttagcttgtctcttacttcccaactaatttctttatactttggtataacaactcttacatctgcatttttttgtgcaagtgcttttggtaatgccccagcaacatctccgagcccccctgttttaatgaacggactagcctcagatgctacaaataaaactctcattctttatccccctcaacctctagcaaataaatttatatcattatactatagatatttttataatatttactttctcaaacggtctttttaaccttttattcatctttttctttaatttcttgatctacattaatttcattcacttttaatattaatgttgccattggaggcacttttactttcaaagaatatggttgattgtggaattgagtcttttcagatacaagcatttcacccataatctgacctgaaccaccatatttactatcatcagaattaaatacttcttcatagctccccaaaaatggtactccaatttgataatcataatacacaatagaagtaaaattaattataaaaatcagtgtatctttatcatttctacttcttctagcaaaaattaatatgctttgttcattattatcggcttctatccaattaaagcctctatagtcatgatcgagctcccaaaaagctttattattaaggtatagattgtttaaatccttaaaaaataattgagtttttttatggattcctaaatcatcgattaggttccattttaattcctcatattctctccactcaattttctgagcaaattcgcaccccataaacgataactttttgcccggatgtcccatcatataacacataaacgctcggagacctgcaaacttattccattcatctccccacattttgtttaccaatgatttcttaccatgaacaacttcatcgtgtgaaagtggtaataaataattttcagcataattatacatcatcgcaaatgttatatttttatgattatgttttctatatttaggatctatttcgacatactctaatgtatcattcatccaacccatattccattttaagttgaatcccaaaccatcataaattgcaggttttgtgacattaggccaagatgttgattcctctgcaatcataagtgcagtcggatattctgcaaatactgctttatttaactcctttagaaaatctattgcttctaaattcccatttcctccatatttgtttggtatccattccccgggcgatctgctataatccaagtaaagtatgcttgatacagcatcaacccttaatccatcaatatggaactctttataccagtataatgcattcgatattaaataacttttaacttcatctctacctagatcaaaattacaagttccccaacccttattttccgctctccattcttcttgatattcgtatgttggtgttccatcaaacttatataatccgtgagcatccttacaaaaatgacctggaacccaatccattattactcctatattagcctcatgcaatttatttattaaaattttaataccttcataatccccatacctacttgttggtgaataataacctgtcccctgatatccccaagaagcatccaatggatgttcaataagcggcataagctctacatgtgtatatcccatatcttttacatacttaggtaaatcttctgcgatttcttcgtattttaagaatccgccatctttatttgtcttccatgagcccaaatgtatctcatatatatttaatggttgctcaagtacatttattttatttctttgatcaatccattttttatcattccatttgaaagctttaggcttatatactattgatgcattatctggtctcaattcactttgtattgcatacggatcggctttgtattctcccatctctccatcgcttcccactatacaatacttgtatctatttccggccttcgcagtataaaaaaagcctctccataatccattttcagttattctttcaagtttgtattcctcttttacttcgaaattattaaaatccccaactacatatacatcttttgcattaggtgcccacgttacaaattgcacacctttctttcttttctcagttttaatatgtgagcctaaaatattataagattcatagtttttaccttgatgaaacaaatatgtgttaagattagttatttcagatttatcaatactttctgttctctttttaacattaattttactatgttctgttttcgacttttcaatcttctccccttctgcttgaaattctcccattaattcttttgaagctgatttttttcttgcgcttgcttttgttgaagttactgcagatttcccttttgaagatttattagttgttctttttgtctttgattgtacatttaattcattcgttttggtggatttagatttattaatattatctccaccctccaattctgattctttattattctcttcttttaaaataattttttcttcgtttttattctccaacgcattcttcttatcaattgccttagatttctttaaactccctttagatttaataccaatttctttatcatttgtagtaatgtcttttaccttaatatctagattattaattggatttaattcagttgtttcctttgaggaaattttctttttcgctcttccctttgtcttacttattcttttctcaacagatgaattatcttcgatagatacttttccgtcttcttctgtcaaaccgttcatatctctaggacctatttcatctttatctttaatcttactgcttttaggatcattttgcattaaactatacccccatccatattcatatccctctcataaactaaattaaatgcttctctttattataattctcactatatatatatcttaccaaattttatggtacttttcacttatttttctttatttttaataaaaattataattaatttaacttttaagataataaatatatatttttatccatatataatgtataatattcaatcattcattttattaaatttaaaattaattcacagaatagcaataatcaagcgcataaaagacgctgtgtattaggaaataaagtgagcagcacctaagttttattctgctaagtttttaatattggaaaaatgattttaaactcatgtcacttatatatctttttaaaatcatgatcagagggcgatcttcactatctaaccaatgataatagtgtttaatttaccaaaattcatgccataaaaaaaagagaatccatatcttgaatcctctctttaacaattagtattaaaacaattttaatatattaccttaaactttataattattcatatatttcaaatgatacaattcaagcacatgaatcaattaataccatagagcctacttattaaaagtgcgaaatattacaaaataaaaaaagatagttattacaactatcttttttgcttacctcgcaacgtcctactctgccacacagtctcccatgcagtaccatcggcgctatagaccttaactttcctgttcggaatgggaaggagtgttacctctatgccatcattacgagatattagcttttcccaaatctctgatttggttgaaaaacttatgcaaatcgttttagcgatttgtattccttatgaaagttttgttctttcaaaattgcacatagtttctttaatgtatttacaacttgactatattggtcaagccctcgacctattagtatcagtcagctaaatatgttaccatacttacacctctgacctatcaaccttgtagtcttcaaggggtcttactagcttatgctatgggaaatctcatcttgaggtgggcttcacacttagatgctttcagcgtttatcccttcccgacttagctacccagctatgcttctggcgaaacaactggtacaccataggtcagtccatcccggtcctctcgtactaaggacagctcctctcaaatttcctacgcccgcgacggatagggaccgaactgtctcacgacgttctgaacccagctcgcgtgccgctttaatgggcgaacagcccaacccttgggacctacttcagccccaggatgcgacgagccgacatcgaggtgccaaacctccccgtcgatgtgaactcttgggggagatcagcctgttatccccgaggtagcttttatccgttgagcgatggccctcccacgaggtaccaccggatcactaagcccgactttcgtccctgctccacttgtaggtgtcgcagtcaggctcccttctgcctttacactcttcgaacgatttccgaccgttctgagggaacctttgggcgcctccgttacattttaggaggcgaccgccccagtcaaactgcccacctaacaatgtcctgtcaccagtttcatggcatccagttagaacttcaatactatcagggtggtatcccaacaacgactccaccaaggctgacgccctagtttcccagtctcccacctatcctgtacagacaataccgaaattcaatgctaagctacagtaaagctctacggggtctttccgtccaatcgcgggtagcgagcatcttcactcgcactacaacttcgccggatttgcagttgagacagtgcacaagtcattacgccattcgtgcgggtcagaacttacctgacaaggaatttcgctaccttaggaccgttatagttacggccgccgtttactggggcttaagttcacaccttcgcgttaccactaagtgttccccttaaccttccagcaccgggcaggcgtcagcccctatacatcagctttcgctttagcagagacctgtgtttttgttaaacagttgcttgtgcctattctctgcggcctgatttctcaggcaccccttctcccgaagttacggggtcaatttgcctagttccttaactgcaattcttccgtcggccttaggattctctcctcatctacctgtgtcggtttgcggtacgggcactacttctctttctagatgcttttcttggaagcatggaatcagatacttcggttccgtagaaccttccccatcacgcctcagaattgttggaacggatttgccaatcccaactccctaaacgcttagactagcatccaatagctagcacatcctatccttctccgtcacaccatcgataataacgattatagtggtattggaatatcaaccaattgtccatcgactacgcctttcggcctcgccttaggtcccgactaaccctgagaagacaaactttactcaggaaaccttagatattcggcctgtaggattctcgcctacatctcgctactaatgccaacattctcactcgtaatcagtccaccgctccttacggtacgacttcagcccgattacgacgctcctctaccgctcacgttaaacgtgaacccgtagcttcggtggtaagtttgagccccggacattttcggcgcaggatctcttgactagtgagctattacgcactcttttaatgagtggctgcttctaagccaacatcctagttgtcttagaaatcccacatccttttccacttaacttacactttgggaccttagctgacgatctgggctgtttcccttttgaccatggaacttatctttcatagtctgactgccggactgatagtatgtggcattcggagtttgataaggttcggtaagcgctatgccccctagcctattcagtgctctacctccactactcacattttccgacgctagccctaaagctatttcgaggagaaccagctatatccgagttcgattggaatttctccgctatccacagctcatcccatgctttttcaacagcaacgtggttcggtcctccacgaggttttaccctcgcttcaacctggccatggataggtcacccggtttcgggtctacagcatgcaactagtcgccctattaagactcggtttcccttcggctccgtaccttaagtacttaacctcgctacataccgtaactcgttggctcgttctacaaaaagcacatcatcacacacataaggtgctctgatcggttgtaggcacatggtttcaggttctatttcactcccctcccggggttcttttcacctttccctcacggtactgcttcactatcggtcatcaggtagtatttagccttgggaggtggtcctccctgcttcccacaaggtttcacgtgtctcgtggtactctggtgcagaactgattatcatagttttcacttacgggactattacccactgtggtccaactttccagttgtgttcaattaactatgatttctcgttatgttctgtccgcaaccccagagataaatctctggtttgggctctttccttttcgctcgccgctactaagaaaatcgatttttctttctcttcctccaggtacttagatgtttcagttccctgggtataccttcataaagctatgtattcactttatgatacatggggtttcccatgtgagtttcctcattcggaaatcttcggatctctgactatgtgcgtctacccgaagcttatcgcagcttatcgcgtccttcatcggctcctgatgccaaggcattcaccatgcgccctttgtagcttgacctaattattagtcatatcacaaagaatatttattcttggctttgttgtattttatatacattaaatctatgtgcaattttcaaagaacattgaaagacttagtctttcaaaattgaacagaacaaatacttaagtaacctttgagcaagtattttatattttgatacataataatgtatctgtactagtcagacatcatgctgatctagatttctccatagaaaggaggtgatccagccgcaggttctcctacggctaccttgttacgacttcaccccaatcgctgaccctaccttaggtcgctgccccgcttacgcgttagctcacgaactttgggtattgccaactctcatggtgtgacgggcggtgtgtacaaggcccgggaacgtattcaccgcgacattctgattcgcgattactagcaactccagcttcatgtaggcgagtttcagcctacaatccgaactgagactggttttaaagtttggctccacctcgcggtttagcatctctctgtaccagccattgtagcacgtgtgtagccctagacataaggggcatgatgatttgacgtcatccccaccttcctcccggttaacccgggcagtctcgctagagtgctcaactaaatggtagcaactaacaataagggttgcgctcgttgcgggacttaacccaacatctcacgacacgagctgacgacaaccatgcaccacctgtcttcctgccccgaagggcttccccgattaagggtaattcaggagatgtcaagtctaggtaaggttcttcgcgttgcttcgaattaaaccacatgctccgctgcttgtgcgggcccccgtcaattcctttgagttttaatcttgcgaccgtactccccaggcggaatacttaatgcgttagcggcggcacagaggtcatgacaacccctacacctagtattcatcgtttacggcgtggactaccagggtatctaatcctgtttgctccccacgctttcgagcctcagtgtcagttacagtccagaaagtcgccttcgccactggtattcttcctaatctctacgcatttcaccgctacactaggaattctactttcctctcctgcactctagatatccagtttggaatgcagcacccaggttaagcccgagtatttcacatcccacttaaatatccacctacgctccctttacgcccagtaaatccggacaacgcttgccacctacgtattaccgcggctgctggcacgtagttagccgtggcttcctcctcaggtaccgtcattatcgtccctgaagacagagctttacaatccgaagaccgtcatcactcacgcggcgttgctgcatcagggtttcccccattgtgcaatattccccactgctgcctcccgtaggagtctgggccgtgtctcagtcccaatgtggccgatcaccctctcaggtcggctacgcatcgtcgccttggtgagccgttacctcaccaactagctaatgcgacgcgggtccatctcatagcggattactcctttaattgctatgccatgcggcactacaatcttatgcggtattaatcttcctttcgaaaggctattcccctctatgaggcaggttacccacgtgttactcacccgtccgccgctaatccactcccgaaggagcttcatcgctcgacttgcatgtgttaagcacgccgccagcgttcgtcctgagccaggatcaaactctcaataaaaagtttaatcttagcttactcaaataaaaattgctggtttacttaaatgtatttatatcattctgttcaattttcaaagaccaatttttctttcttacaactactgttgtaatgttttgttgttatctgtcgtttctgacagcttactcagtatatcaccgctttcgaagcttgtcaataactttttaaaaaaactttttgaactcatttttcagtagttctattagctttaagttattaattttgcatctcttagcgaggattttatcatatcatcaccattcgacattgtcaacaactttcctagaaaatctttttccttttaagttgttttgtttatgtctcttagcgacgtgttttatcttaacatctctgatattttcatattatttgctttcctattactaaatgcgattattttcatttttctttataatacgtcattattctagattttatacatactgatacgctagcaatagttgtcactccaatttggttcaatctattacatttatatatgttttttagcctaattatctcattcctaataattctaaatatctttattaataagaaattaagttcaaaataataaaagatcttatgatcatgaaaggatccaattacccctggatacataaaatttcatcaaacataaaaactttttcatataataacagaaaatatgctctactaaatgagtttttaatcataaaaaattaaactataaagttaatatgaaatattataataagattagtctgcaaagttgttaatctctcactaactactttgttgttcagaatagatattaatgttatataaggaatgaactctatcaaaaaaggcttatcgtaaaaatatacggtcttaaatatgtgcttaggatagaaattcagttgtagaattaagaatacattgaattaataagctctttcgtaatgatttagagaaatgagttatacaaaatcgtcatacttattgaattttttagaaatacggcattaaataatccagctatacagcggcgaaacttatcatcttaccattcctaaatattataaaataaaaaaagatagttattacaactatcttttttgcttacctcgcaacgtcctactctgccacacagtctcccatgcagtaccatcggcgctatagaccttaactttcctgttcggaatgggaaggagtgttacctctatgccatcatcacgagatcttcaatttgaaaaaactttgttctttcaaaattgcacacagtttctttaatgtatttacaacttgactatattggtcaagccctcgacctattagtatcagtcagctaaatatgttaccatacttacacctctgacctatcaaccttgtagtcttcaaggggtcttactagcttatgctatgggaaatctcatcttgaggtgggcttcacacttagatgctttcagcgtttatcccttcccgacttagctacccagctatgcttctggcgaaacaactggtacaccataggtcagtccatcccggtcctctcgtactaaggacagctcctctcaaatttcctacgcccgcgacggatagggaccgaactgtctcacgacgttctgaacccagctcgcgtgccgctttaatgggcgaacagcccaacccttgggacctacttcagccccaggatgcgacgagccgacatcgaggtgccaaacctccccgtcgatgtgaactcttgggggagatcagcctgttatccccgaggtagcttttatccgttgagcgatggccctcccacgaggtaccaccggatcactaagcccgactttcgtccctgctccacttgtaggtgtcgcagtcaggctcccttctgcctttacactcttcgaacgatttccgaccgttctgagggaacctttgggcgcctccgttacattttaggaggcgaccgccccagtcaaactgcccacctaacaatgtcctgtcaccagtttcatggcatccagttagaacttcaatactatcagggtggtatcccaacaacgactccaccaaggctgacgccctagtttcccagtctcccacctatcctgtacagacaataccgaaattcaatgctaagctacagtaaagctctacggggtctttccgtccaatcgcgggtagcgagcatcttcactcgcactacaacttcgccggatttgcagttgagacagtgcacaagtcattacgccattcgtgcgggtcagaacttacctgacaaggaatttcgctaccttaggaccgttatagttacggccgccgtttactggggcttaagttcacaccttcgcgttaccactaagtgttccccttaaccttccagcaccgggcaggcgtcagcccctatacatcagctttcgctttagcagagacctgtgtttttgttaaacagttgcttgtgcctattctctgcggcctgatttctcaggcaccccttctcccgaagttacggggtcaatttgcctagttccttaactgcaattcttccgtcggccttaggattctctcctcatctacctgtgtcggtttgcggtacgggcactacttctctttctagatgcttttcttggaagcatggaatcagatacttcggttccgtagaaccttccccatcacgcctcagaattgttggaacggatttgccaatcccaactccctaaacgcttagactagcatccaatagctagcacatcctatccttctccgtcacaccatcgataataacgattatagtggtattggaatatcaaccaattgtccatcgactacgcctttcggcctcgccttaggtcccgactaaccctgagaagacaaactttactcaggaaaccttagatattcggcctgtaggattctcgcctacatctcgctactaatgccaacattctcactcgtaatcagtccaccgctccttacggtacgacttcagcccgattacgacgctcctctaccgctcacgttaaacgtgaacccgtagcttcggtggtaagtttgagccccggacattttcggcgcaggatctcttgactagtgagctattacgcactcttttaatgagtggctgcttctaagccaacatcctagttgtcttagaaatcccacatccttttccacttaacttacactttgggaccttagctgacgatctgggctgtttcccttttgaccatggaacttatctttcatagtctgactgccggactgatagtatgtggcattcggagtttgataaggttcggtaagcgctatgccccctagcctattcagtgctctacctccactactcacattttccgacgctagccctaaagctatttcgaggagaaccagctatatccgagttcgattggaatttctccgctatccacagctcatcccatgctttttcaacagcaacgtggttcggtcctccacgaggttttaccctcgcttcaacctggccatggataggtcacccggtttcgggtctacagcatgcaactagtcgccctattaagactcggtttcccttcggctccgtaccttaagtacttaacctcgctacataccgtaactcgttggctcgttctacaaaaagcacatcatcacacacataaggtgctctgatcggttgtaggcacatggtttcaggttctatttcactcccctcccggggttcttttcacctttccctcacggtactgcttcactatcggtcatcaggtagtatttagccttgggaggtggtcctccctgcttcccacaaggtttcacgtgtctcgtggtactctggtgcagaactgattatcatagttttcacttacgggactattacccactgtggtccaactttccagttgtgttcaattaactatgatttctcgttatgttctgtccgcaaccccagagataaatctctggtttgggctctttccttttcgctcgccgctactaagaaaatcgatttttctttctcttcctccaggtacttagatgtttcagttccctgggtataccttcataaagctatgtattcactttatgatacatggggtttcccatgtgagtttcctcattcggaaatcttcggatctctgactatgtgcgtctacccgaagcttatcgcagcttatcgcgtccttcatcggctcctgatgccaaggcattcaccatgcgccctttgtagcttgacctaattattagtcatatcacaaagaatatttattcttggctttgttgtattttatatacattaaatctatgtgcaattttcaaagaacattgaaagacttagtctttcaaaattgaacagaacaaatacttaagtaacctttgagcaagtattttatattttgatacataataatgtatctgtactagtcagacatcatgctgatctagatttctccatagaaaggaggtgatccagccgcaggttctcctacggctaccttgttacgacttcaccccaatcgctgaccctaccttaggtcgctgccccgcttacgcgttagctcacgaactttgggtattgccaactctcatggtgtgacgggcggtgtgtacaaggcccgggaacgtattcaccgcgacattctgattcgcgattactagcaactccagcttcatgtaggcgagtttcagcctacaatccgaactgagactggttttaaagtttggctccacctcgcggtttagcatctctctgtaccagccattgtagcacgtgtgtagccctagacataaggggcatgatgatttgacgtcatccccaccttcctcccggttaacccgggcagtctcgctagagtgctcaactaaatggtagcaactaacaataagggttgcgctcgttgcgggacttaacccaacatctcacgacacgagctgacgacaaccatgcaccacctgtcttcctgccccgaagggcttccccgattaagggtaattcaggagatgtcaagtctaggtaaggttcttcgcgttgcttcgaattaaaccacatgctccgctgcttgtgcgggcccccgtcaattcctttgagttttaatcttgcgaccgtactccccaggcggaatacttaatgcgttagcggcggcacagaggtcatgacaacccctacacctagtattcatcgtttacggcgtggactaccagggtatctaatcctgtttgctccccacgctttcgagcctcagtgtcagttacagtccagaaagtcgccttcgccactggtattcttcctaatctctacgcatttcaccgctacactaggaattctactttcctctcctgcactctagatatccagtttggaatgcagcacccaggttaagcccgagtatttcacatcccacttaaatatccacctacgctccctttacgcccagtaaatccggacaacgcttgccacctacgtattaccgcggctgctggcacgtagttagccgtggcttcctcctcaggtaccgtcattatcgtccctgaagacagagctttacaatccgaagaccgtcatcactcacgcggcgttgctgcatcagggtttcccccattgtgcaatattccccactgctgcctcccgtaggagtctgggccgtgtctcagtcccaatgtggccgatcaccctctcaggtcggctacgcatcgtcgccttggtgagccgttacctcaccaactagctaatgcgacgcgggtccatctcatagcggattactcctttaattgctatgccatgcggcactacaatcttatgcggtattaatcttcctttcgaaaggctattcccctctatgaggcaggttacccacgtgttactcacccgtccgccgctaatccgttcccgaaggaacttcatcgctcgacttgcatgtgttaagcacgccgccagcgttcgtcctgagccaggatcaaactctcaataaaaagtttaatcttagcttactcaaataaaaattgctggtttacttaaatgtatttatatcattctgttcaattttcaaagaccaatttttctttcttacaactactgttgtaatgttttgttgttatctgtcgtttctgacagcttactcagtatatcaccgctttcgaagcttgtcaacaacttttttaaaaaacttttcgaactcatttttcagcagttctattagctttaagttattaattttgcatctcttagcgaggattttatcatatcatcaccattcgacattgtcaacaactttcctagaaaatctttttccttttaagttgttttgtttatgtctcttagcgacgtgttttatcttaacacatagtctattagccattctgacaaaaatcatcatttataccatttaaatcttaaaacctataccaaactccatttttcttctcatttctactattgatacgctaggtatagttaatagttatttaaatattcttctaatatataataggtctcatgatcctcccactttccattaattaatagatatttttcatttactccaattaatctgaatccacatttagttaatacatttttggattttttgttatttatcaaagctgatgcttctattctatgaagaccacattctttaaacgcataatttagtagcagttttacactctcttgcatatagccattcccctgctcattttcatctattgaataacctaatatgccattcttcaacgatccatatataattcgtgaaagttttatctttccaatcaatttttcttctttaaaaatacccaaatctacacttgttccattcaaaaattccttataactcttatttaacaattttctttgtgtctcaactgtgtagaaatcactatctctacttggttcgaaaggagccaagtaatttttatttcttttataataatccaacatttcttgagcattgctaggagtcagatttctaagaattatattttccccttttaattccactaatgaatacctgcacatttggtcatattcaattctagttataccaaatgacagttcatcaagatattcaccttgaaaatattcattttcattaaatattccttctagagtaaaacctagatctaaaaatgcagttaagtctattttttcaagaacttttatgttaaccttaaaaatattcgaatctttaaatattccctttaatataagcgatagtgtatcacttaataattcataattatattctctatagaacttaagattgacgttgcatgttttgcttctgtcagttaattcatcagtactgaatctaccaatgataatatcatccatatctcttattaaatattctgttttattcgatctatttccttgtatctttactttcatgtttgattccatataattcccctctacaattatgaaaatctgtcttctcgattcttaatccattatttattattttcaatttcactattcaacattcctatataatcattcaacacttattttaattttcctttttgctgtaatcttagttactcttatcaattatatttccctaaattctatatagaagattattactggttacataagtgccacctcataaccctatacgcccttcttacactaactaaaaattgataattagaaaagcaatataattatactctagtttcataaataaccctctctttttaaaatatataagagattatatatttcatatttttatagcaccatatatactaatattggttttctagatttaatcttgattgtgaacttacattattcagatatcaaatgcaaatttactattgtagctatatacttagacctaatgcataaattttatccacaaaagtcggatttagtacatacttatacacaaaacccacaatatattgttgatatttctacataccatgttaatatattgcgggttctatttttaaggaagtttactatattatctaatttaaccgtttatttatttgatgtttatatatctactgtaatattccacaagctacgcccaaaatacctactgcaaataatccaaagattattattaatggattcacgttcttctttaatagatacatacataaaaatgttagtaaaagcggaactaatcctggcattaagctgtctagtacactttgaatagttgtaactacttcttttccatcagcttgtgtatatttagagagaacaaaaggtatattaacagttgtccattttgaaacaagaccacctataacaagtaatccaagtactgaagcaccttctgtaagatatctaagtttatttcctcccatatcagcaactaattgagttcctttttcatatccatagaacattccataccagtttgttgcaagtcttattgcattgaatcctatgaagaaaattaatggtccaattatacttcctgtaagtgcaagtcctgcccctaatgctgcaagtacaggtcttagtgttccccagaatattgggtctccaactccggcaagtggtcccataagaccgatcttaacaccacttattgatgcctcatctatatctgccccatttgccttttgttcttccatggcagctgttattcccataattggcgttgccataaatggttgtgtattaaagaattctaaatgtcttttaagtgctgcacttaattcgtcacctttatataatttcttcaaagctggaattaatgtaacacaaaaacctattgcttgcattctttcaaaattaaatgatcccaataagaaatttgaacggataaacatttttactatatcacttttatttaatttcttttcactcattattttatctcctttctgtacttacattaactctgaatcatcaatatcatcaatacttcctgttccagctaccgctactttaccttcattagctattgattttatatggaatattgctgcaataacacctacagcaccaaaaccaattaaattgaagtttgtaaatgctgctaataggaatccaatgaagaagaatggtagtaatgatttactattcatcatattcattaccattgcataaccaacaactactataaatccacctgacacttgaagtcctcttgtaataacttgtggtatagctgcaagtgctgcatttactgcatctgttcctgcaagtactcctactatggctgctggtatcgctacacgtattgcttgaagtgataaccctagtatatgacacatttctattcctcttgtgttacccttttcagcatatttatcagctaagtgttggaaaaatacagttattgttctcacaaatatagtaagaacttgtcctgcagctgcaattggtactgctactgctatacctgctccaattgattgtttaccgattataacaagtattgctgaaattacacttgcaagtgccgcatctggtgccatagctgcaccaacattcatccatcctaatgctaacatttcaagtgttccacctagtataattcctgttttaatatcccctagtacaagtccaaccaatgtacatgcaattattggtctatgaaattgtgcctcatcaagtacacttgccataccagtaattgctgcaactattactaataaaattaattgtaaagtgctcatttgtaaattcccctctttcttttaatttatatataaaaacttttttaaattttatatatctaatcttttaacaggatttattattccttctatcaaaatctaagagtttttaaaggatcttatctttggtttttaggtaaaatttatgtctatataagttgtaattctttaaatttgtccatcaaatttactttaggatcttttgctagtttcctcacctctaattcgatgcctttttcattaagctttttaaatgcctcaatatcaacatcattcatgcacaatgcatttgtaacctgtttatctccagctttatagcacattcccccaacgtttacagattcaataggtactccaccttcaaccattcttaatacatctgtagggtttgtaaataagaataaagttttaaaactgtcaaatttaggattattatatgcttcaattgcctttgctattggaagcacatatgcttttatccctggaggagctacttgaattactaattgttttcttaagtcatctgctgcaacttcatcactgcaggcaaatattctattgcatccactatactttgtccaaactgttgcaacttgtccatgtattaatctgtcatctattcttacaaaactaatttccatctttatatctcacctttcaaatttcatattataattaaattcatgtaattcttatactaactaatcataggttgctatattatctcatcatctaaatcctcttcaatatttttagataaagttcttatagcctcctttccggaattttctgcaattgataaaagttctgacacacttgaaaaatctctacttcctagaacctctaatatcattgggagattaacacctgtcacaatttccatattctcatgtttcattgcaattatgctcgctgcattaaatggacttcctccaaaaaggtctaccatgaacaatacgccatctgttgagttcattttttctataagtgaattatatttttcaactagagcatctataccctcccctggctgaaaagtaacacttcccacattttcttgggctccaaaaatcatttcagctgatttcaggatttcttccgagaatataccatgagtacctatgattactgctatcattatttcatcatcctttcctgctacatatattatttctataccaatatacctagcaattcccatgccaaaaaaagtgtgtcaacaaatacttttctccaaacatgaattctaaacgcatacaatgcggataagttttcaccttgacactctaaagtattatttgacacacttttaattgtattttgacacattatttttcttatataaactaaatttaacacacatctataacatcaatcatatagtatagctcatcatccgtcagctctattgataaagcttctttaaatattaaatttgctcttcttaacacttccagatatcttggatttaattctgaatcagatgaatcatataccagtccattatttaaaagcatcctttctaatgcacatgcaacatgaaacataattcttagtttagttggattctcataatgtacattcaaagatttttcgatagattttataaaatcatctaataacgaatatatcttttcaggattaagaaaggttaaaatctctgttaaagtttgcttacaaagattttttaaaacaatctgattttctccttttataaccggattaatatcctttccttcaattatatttcttaaaatattttctccagatccatcaattagttcttcaatcgatataaagggaatccccatattaggatttgctattcccacaagtgctaaaattttatttttccgcgaaatctgttttattgactcatttagattatttaatcctactgggattattctaacattatcgttaattgagatattctttgctacagcttcaactaactctttgagtttaattgcagcgcccttacctgttgagcaaattgtaattatagcattctcttctcgcattttaccttctgtcatcatattattcgtatatcctctaaaatcagtaattaaatatgaatatactgaatttagatcagcatcaaaaattgagcattttctgactgcttctagtactagagccgttgataccatatcaatactcttaatatttatcttggtctttttcgttatagtttcaccaaaactatttaaagatcccatatctactaaaagtaatacacctttcccttcatctacttgcttaactttttcaataacactgtctataatatcagcaggttttctttcaagcggcatatcaactgctgcaatattatctgcatcaaaaagttttttagccactgccaccatgcttgtagcagtgcttgtaccatgagatgcaactactattccaactctttcttgatgtgataattcttgtattgagcttagaagtaaagctaaatattctatttcaacttctggaattattaagttatatctatcctctattaacttatgaatctctttagctactccatattctttactattagatgataatgttaactcaatatttgttgaaaatgatactgtgtttttctttatacgattaaataacgcgctgaaatgtaggcttatagcatatataaatctatcacttaactttctgctcaatctattttcagctaacatttttatttcttcagcaaaatcaacaatatctttatcaacaattttcagtaaaccttctctacgatacgcatcattcttgaatctagcataaaattgctttaaatgaacatttatatctgttgttatataatttttaatatcctggtcactcataccttcttcttgtaaaacaaatgccttgtcctctataatattgtaaatattaaatggtggctcataagcgtcagtctctaaaaaagttttgttaccatcaggtttaaccactaatgtactaggaacccttccccaaaaattggaatcatcttttattttaccttcaaaattaagtatcccatttctcatgctttctggtagtaaatctaaatttatctcaatacatttatctgtattcatgcaatttagaaatcctgtggcacaaactagctgtatatttgactttaattgacccacatttccatatgttgtacttccaattaatgcttttatcgactccgatgaaattttaatagtcttatttacccgttgagcttccttagaaagtaaatagtgtataagttctaatttatcttgtaatgatctctcttcaaaattcggaataactatggttataggaattcttctaataaaagtatttagtaatgtagaattaggatcttctgttgtagcacctattaacaatacattagctttacgctgcctatctgtttctccaagcttattatatgttcctgtatccataaaataaaaaatcatttcttgcccttctggtggtaatctatgtatctcatctaagaatagtattcctccatcagccttttcaacaattccctctttttccttatcagctcctgtaaacgcccccttaatatgtccaaaaatatacgataaaagtaattgtggattattagcgtaatctgcacaattgaaaacaacaaaaggcgcatcttcaggtaacttttttatatattttgaatactggtacattatattaacaaataagctttttccaactcctgtacttccaattatcaaggtgtgaagtccattaggaggatataggagcgcagcctttgcttgttcgatttgattttttaggctagtattagctccaattaaatagttaaaaggagattgctcttcatctcttaccacatcttcactcgaggcaaatttcattatatctgatatctcttccaagtcgtctggtaactttacagataatatttcctcaaaactttttctatcaaagtaaagaacaggtctatttttaatcttgataattttggaatctctacatagtgtattaagttcccttgatacgttacttcttaatatttcaagatattctcctatttcttgcgcgctaaatcctttaacctctaagagcttattctttgtaaatttttttgagttattttcgatataattgtaaattctatcaatacgcttcatgatgctcaccttcttttagatttgtctataattaataaaaaaactaactctttcaagtaaatatatagtatccttttactaaaaaaaatacaatatacttcaccaaaagagtcagttaaaatcaatcactataaatttactatatacttgaagcttttagaccaatacctgaatctagtattactttatttctaatatatcttttataacctctccaccaattatcattcctgcaaccggaggaacgaatgatatacttcccggtatttgtcttttaatagcgcacttcttagtaccaccagtacaaacacatcctgttttacatgtaacaacatcatcatagttaggttttatcggaacttcttctgaatatactacctttaatttttctattcctcttttacgtaactcagatctcataaccttagccaaaggacagatttttgtcttaaatatatctgtaactttaaattgtgtaggatctaatttattaccagttcccatagaactcattattcttataccttttttataacaatattctactaatcctaatttagctgacactgtatctatcgcatcaactacataatctacatcatcaggaattatagactctatattttcttgtgtaacaaaaatttgatgtgttataacattgcatgttctatttatagataatattctttctttcattacttctactttaggttgacttattgtcttataggtagcatgcacttgtctatttagatttgttaagcaaacagtatcatcatcaacaatgattaattcacctactcctgctcttgcaagagcctctatagtatagctcccaactccacctactccaaaaacaataactttactattttttaatttatctaatccatctttacctatcaaaagttcagttcttgataaagaatgttgtgctgtcataaattttctctccttattatcttatacttttaattgatattataacacaaaaacaatcgaaaattggcagtataattattatatattatagccttaataatgattatttacatatatatgttaattaataccaaagcttttcttttaccctcacacggagtgcacaaataattttacaaatttatctattaaattgtcaaactaatgattataatatatattaagtatcatatatgtttaaccaaaatatttattttactataatttattgaatttagtatagatatgatgaaatttactgctttcgttcatattaagaacttgttcatttttagtttctatatattactcaataaatttacataataattaaatatatacataggttatatcatatttattaattaattattttaggaggctcactttatatatgattattggaataattgctgctatggcagaagaattagaactattactaaatgatttaactattgaagaaaaaaaagataaggctaatatgactttccacaaaggaaaattatatggaaaagatgttgtagctgtagtttgcggtatcggtaaagttaattcagctatttgcactcaaatattagcatctgaatacaaagtagataaaattattaatgtaggagttgctggtggaataggaaaagaaatttatcctggtgatattgttgttgctgaaaatttagttcaacatgacatggatactacagctttcggagataaggttgggcagattccaagactcgatacatttgactttaaatgtgataaagaaatggtttctatagctaagaatgcatgcgagaaaattgcagaattaaatagttttacaggaagaatcgcttctggtgaccaattcatagcaaatatagaaaaaattcattggcttgatcaggagtttggagcaatatcttgtgaaatggaaggcgctagtatagctcaagtttgctatctaaacgcaattccttttgtagttataagatctatttctgataacgcaaataatggtgctcatatggattatgagaaatttgtaccaatcgcagttaaaaattctactagaataataaaacaaatgttagaaatgatgtagtaaaaataatatcttatatagggaaagccgtcttttataagtgtctaaatatatttatatacacttataaaagacggctttctttatatcaatgtcttcctatttaaaatactattctacagtaaacatctttaattcctcttgcaatttatatgatatttgctgcaaattgccagcatactctgttaattctgccattgttgcatttacttcctgagctgatgctgtaacctcttccgatattgatgctgattcctctgaaaccgctgctatattttcaatttgtgtcttaacttcctctttatttaaattcattttttcatttaataccttaatattttctattgctcctgttaaaggaattatagaatcaactattttattaaatatactttctgtttcctttattgcttctccttgtttctgtgacatttctctactttctttcatagctactttagtagaatcgctcttattatttatttctgaaacaattgcttttatttcatctgtagatttttttgattcttctgctagttttctgatttcttctgcaaccaccgcaaagccttttcctgcttctccagctcttgcagcttctatacttgcatttaaagctaaaagattagtttgttcagttattcctgctattacatccgatatataatttattttatttatactttctcccatttcatgaaccatgccaccagacttaattgcattttctttagacttttcagctttaaatattaagtcattaagtatagataatccttgagtacctaatttctcagcttcaccagctaactcattaatatgattagtctctccatcaacttcatctatcctatttgataattcttcagtactcgttgcaacctctgttgctgattgcgcttgatttgtagctccatttgcgacttcttgtattgcatttgaaacttctgatactgatgcagttgtttcctcagacatactagatatatttcctgatgcctccaataaatcagatgatgtattttgaattcctttcaataacttcgagatattctctaccataaaattaaagttatctccaagttcagcgaattcatctttagccgttacaattattcttttactgaagtctccttcagctactgtactaaacgcttcttttaatttatgtatttctttcacaatatacgatgctgaaatcattgatataattattcctataattacacataataaattagcagtaataactgttaccttcattgttaaaacattatttgttacttctttgccatcaattatacctaccattttccaccctgttaaagcatctgtttcttgacaggcataaaattctttcccattatttttccaattatatactcctctttcttcatccttagctgattcccaaaatggtaatttactaatattatcatctatctctttattattattgttatttgctacaacatctccatcgttatcgactagtactatgaatcccgtattcagtagttttatgttactaatatattcttgcatagaatctaaagacatatctattactattaccccggtgatttgtccattattatctttaacagcttgagcaactgtcattacttgctttcctgttacgctatctttatatggttttatgtatacaacctttccatcagcttccttagctttcttataccattccctttctttataattgaaatcattaatattcatcgttccactatctaatacaagctctccatattcagttgcatatcctgcattaataattccatttattgaatccttagtatctttaaacataccttgtacatatttagatattagtgcatgatctacttgcggatttgataaatctttgatatcggcatttttcgatattactctcaattgagtattcaaaatttctagatattgcgaaaaacctttatcaacttctttaatagtttgaacacttgtagtcttcaaattattctccaaaacaacatcagacttaaaaattgctactaatccaacagttacagttgggagtagaagcataatgataattccaatcactatctttctaaacagtttactattcctattcatttcattaacactcctataaactttatctttctctagaattaactacattaatatacataatactacaaatagtaaatataaacacaacttatctgtaataatataacttaataggctaaatataatattttcatgataacattgtattttactatattcaagtagtcgaaaataagctaattgaatatccttgattttaatattcacttttacttgcaaagataaatgttaagctaatttaatatttaatttagcctaattattttattatcataaataattaggctggattacaaaaatctttaattttttatcaataaaaatagagtcatcttataccggaaacccaatctaagataactctatttttactatataatattaattcctatttccaagagatatttgcatctcttcttggaacagttctaacatatttcacattaggatatccaacaaccatacatgttacaatttcttctttaccttttaaaccaagtaagtctcttatttcatcatttccctgtgctgccattgtaaagaatccactaaaaaatgttccaaggtctaaagcattagtcataagctccatattagatgacgctaaagaagcatttacagtcgagtctgaaactgcaagaattaacgcaggtgcattaaaaaataatttatcattcttcttagaatcctctttatagtcattatacattttaatccacatttgtgcatatctcttgaaaggtaaagtttgtggatttagatttttaagtatttcttcccctctagtttttaagttttttaaagccaattccttcaataattcaatattatcttccacaactacatatgaaacattttgactattagttccagtttgagtgaatctaccagcctcaataatttttaatatcttttctttttctacttctttatctttaaattgtcttgtagttctcctaaatttaataaaattaagaagtttctccgattctatcttaaactcagactcattataatcttttacatcttccatattatattcatctgtagatactgctcctttagggcaaactgcaatacagtgtccacacttcatacatctaacatttttgatttctgccttgtttccatttatctcaatatcattaggaaaacaatctttaacacaaagtccacatcccacacacttttctttatctacaatcatcatagtataattactccttttatattaaatttatctattattatttttaagtatccacaatatatttatataaatttgcctacctatttcatcttagacatattacaattggctaattcattaactaaattctcaattgctttttctctatcctcttttttatagaaatcaaatcccatttcattctttatattttctgcctttaagaatatgtaatttaaatatcctgcaattaagtagttcttaacccaaaatttatgcgtgtcatctccataaagttccctaaggcacttattgtattcctcttctgaccctagtaaatgtgctgtcatctgattattctctaagtcatctaaaatcgcaatcttagaaatttcagaattatctgcaataaagtttgcaacttcttttaatatgaaggtgagtctataaattgatgattcattactctttgatttcattttctcacttaaagatctcgttgcacaactcataaccttttttactgctagacgaattaaattatctttactctggaaatgatagtttaccattccattaccaagtcctgccttctcggtaatatcttttacggtaatttcactaggctttttgccttcacatatcatatgtatagtaacatctatcaacttttctttagcatcattttctcccatgttttcacctcctattattataggctctgcatattgaacaccatactgtataacatacagtatactattcaataactatttgtcaagctaatgaactttgataaataaaaatcaccgcaaaaatgcagtgatttttttattgatattcataagttctcaagagttaattttaagactttaactttgaaattaacatatttactttcattacataaatcttcttgatagagatactacaaagctcgatgtaaaaaacactcccaagaatgactctaaactaacagccatcttcatccagtttagcgggattatatcaccatatccaacggttgtaaatgttattattgtaaaatataatgtattaccaaacttactaattaaaaaattagcatcaaaattcgaattcttaagcatttcaaatactgttatgaataaattttttgaattcaattgaacatccttacacatcagcaaattaggaaagaaacagtatagtagaaaaaatgaaacaatcactactaccatagacaataatgttctctcccaacttgtatagtactttgtagttatgccaattaaataatacagcaaattaaaattacctttatttttactttttctctctaatctctcatacttcttaaaataataaagcgtttcaaggtattgatctatccttccactagatttatatatatctgatacgatcaaaaagttccattttgttttcttaaagtcattgtcaaaaatcagaggcttgtactttttgttttccaatagttcatattccagataacatttatctgagaaattagttttatacagactaaacttacctttaatatcatcaaaattaatttctgattttttataaaaagaacactgcaaaaaacttaattccccatttatatctaactccaacttgcttaatccttcaaatctacaatcaacaaagcataattccttttctcctttaattttgtcaaggataaaatcattcagtatgttaacttcttggaaaagcaaattttctttaaatatagatgcatttccatagaattttccaacctcagaattctccactattatgctttctttaaccacagtttcgcttattcttaacttatcacagtttatgaaccttacaaacatgttatttcttattatgcaattattgatttttattcttttataatctccccctaataattctatatcctcaacaaattcacaattattaagtatcagtcgtaaatgactatccattttgagattagaatagctatcaaatctaaatttctttaaaaatatagtattataaaattctcctaaaatattattacattcaaatgtcactaataagccacttctattttctgtatgacctttatggtcattaagatattccaatagctctttctctgtaaaaatgactctatattccaatataactccatctttatcaatcaatataaaatcatctttttctttaatatctttttctagctctaattcatcaaagcctttagttaatatttctttattcattatctacctcatcctaaagtatatataacttttattttattatatattatttaccacccagcttccataataatgcgaattgataaaaattaatatatcacttaatttttatttttgaatatattaataaagatataaagaatatattcaggagtagaaaatgctatcaaagcaagagtttattaaccaatctttagaattaaacttattctttctaagaattatgcgggaacactcgatatttattgaagcagccctaccaccaaagaacaaagatcttataagtcaagctgatgcctttaaaaatgagtttacaactttactctctcgtgccatattactatcagatggagttatccctttcgaaacattagattccaatgaaataagcacaaaatatacaatggatgctgaaaaggctactcaatttgctactggaatttttatagactctaatataacttctatggaaaagtcattaatatctggcatgagaaatagtgatacatctatgttaaccgataatgtatatatgcttaaccaccagtctatagctgcaactaatatgattattaaatttaaaacaaaacttagaaatgatgttctatcttgtaagatatttacgactttataccctgcagttctaaaccatgtgcttagtgaagcaataatatttacagagcttctaacacgattgcaaagtggtgtcggaattggtactaagagagatatactaatacttgaaaacttttgggatgataagttagcagaacattcatttactattagaggaatgctagatcctaccgaagtagaattattcaatatagctaataatttcggaaaagaattcgtggcattgagagatgaggcttctgatatggataaatcagcagaagatttgtctgaacttaccgagactaccttaagtgcagccactaatctcagaaatttcaaagcccagagtactgaagggcttttaacttgtaaaattaaatcaataattctaccactctttgctgatcatgttcttagagaatcaaatcactatataaacttattaaaatccttcagcaacatttaaattcatttaatttgaagtaatttataactcaaaatagacaagacagttaaattaattccgtctaaatatatctctcgattgattagtagaacatatctttatcaatcaaatataaaagtggcataagtattaaatatttatgttgttgttcacacattataaacaaagttatcaacagaatctgttgataactttgtttataatgtggatctttttattattaataaattttcttttcattatagtttttattctataatcaaattagtcttgattttttttcaattatacttataattaattgttgtagcaactatttgtaaaacaattatatttacaacaactttatttactggaggtaattatatgtttgaatcctatgatcaagatattggaatgttgacaaataaagtttctaaaaaattaacatcttatctaaataataaattagaaaaatttaatattacaaccgagcaatggacagtactattaaaactctctaaaaagaataaaataagtcagaaacttttagctgaagtttcaggcaaagaccagtccactttagctagaatacttgatatacttgaaagaaaggcttttattgaaagacatccaagcaaagaggatagacgttcctttgaaatccatataacagatagcggtttaaatattattggagaggtttctccttttttagaagatttatttaataaattacttaaagacatatctcttgaaaaactggaagtatataatgcagttcttttaaaaattgataaaaatataaatagcttataatacaaaaggaggaatcaatatggaaataaaaaatcattttaatgcatcaaaactttggaccaaaaattatatatttatgctactttcaaatttatttatatacttagctttttatatgttaactccaactcttcctgcatatgccaagctatgtggcggtaataatttagaagctagtctagttgtaagtacattttcaataacttctttacttgttagattattcataggcaatattatggataggatcgaaatcaaacctctactgcttttaggcgctctaatacttgctggaagcacactatcatatatctggcttccaatagatgcaataatattggttcgcgtcattcaaggtataggttggggacttgcttctactggtgctgctgcaattttttctaatattgtgccaaaagagaaacgcggtgagggcatgggctactattctctttcaatgataatatccatggcattatcccctatggttgcaatagtaataatgaatttatacagttttaaaaatattgttcttatttcaataactttagtaggtattggtattatatttctcagtcaagttaaatcaactataaaaatctcttcaacatctaatacgatttccaaatgctcattaaaagattcctttgaaaaaaaagcggccttgccttctttattatgcttttttcttgtaatcacattatgtggaattatgagttatataatgttatacgggcaggagctaaaaatatcctctatttggatttattttattggatttgttgcaatgattttaataacacggcctcttgttggaaaaatatttgacgaaaaaggacatgctgtagtaatattacccggctcaatttgcttaataataggtcttataactctctcctatgcaaactctattttaatgcttatactctcctccttattctacggacttgggtatggtgccgttcagccttctcttcaagcttgggctgtaaaccgatctccttctaataggcaaggagctgctaacggaactttcttatcttccatggatttatcctatacacttggatcaattcttctaagtttcattgctgagcataaaagttatgcaattatgtatagattttctgctatttttataattttgcttttattgatatactcctattatgtttttatagataattctgcagaaccagaaattatagaagagaaactttcctaaattaaagggttgttgcattagtggaattccactttgctaacatccttcagttcctttatcaattctaattttctatctattaaattctgaatccttttatcttatttaaggcctgtataaatttatccacaaaaccttcctttttactttagatatatccacattaatcacagtttttttataataagtttatattttggtagtagcaaatggctcatgcctagaaatactacttgccaacaagcagttacaaaaggatttcttaaatccacttgtgttgttcctatcagactaaaataggcgatagatcttcttgctgaaggttcaccatattttaaattaacttctttaattatttaattcttttagattattcacaaacttatgatattaataaaagattcaatattaaaaatagaggcagaactaagatctgcctctatctattttatagatatgaatactacaaaaaatatctaactactcattttcttttgaattacactcgtaaatttctatcaaggcttctaatatccttatataaaagtctatttcatattcttcaatttcttcattatttatatttttattcgcttcatgcacctcattcaatctccttagtatatagacttaatagttacaatactattaattgcaaaaaataagagccaacttcgaggattacgaagtggctcttcaacacgaggctgtaatataccttttaacagatacattacatgtccatttactttttattttaattatatgtaactaccataaataaaataacatagtagaaaaagattatcttcacatttataaatcaatttcctccatgagtagtattcacatctatagctacagtataacactatatagtaatatagcaacgaatatattttaaaatccttttttatcccttcaactataagtatatatctgaaaattcaatgctcatcctttcaactttcttatcgtctaaatcattgtttatttcagtattacatatccccgattcatcttcatcagcgagaacttttgcaggaagtattatattaaactgcgtgtactcgccatactcactttctacagtaatacttcctctatgcatatctactaatgatttcacaagagccagaccaattcctgttccctcgcttcttcttgaaagtgatttatctacttgtataaacctatcaaaaatactatttagtttattctttggtattccgcttcctgtatctcttacagtaatatatatataatccgctagatcctgaatactaacatctatctttccaccagacttggtgaactttaccgcattagacaataaatttaatattactctttcaattttatctgcatcaaatcctaatactttttcctctatatctgtatcaaaaatgatctctatgcctttttcctttacatattctgctacagatagagtaatatcttctactattctcacaatatcatgattgcatatattcaatgtataaaaacctgaatctatctttgttatatctagtaaattattaatcagccttagcaatctataacaattctgcttcattatacccgtgtacttccttattgatgaaagattgatatttccttttgtatctgtgttcatatttattaactgtagtgaacttaaaagtatatttaatggtgttcttagttcatgagacatattagagaaaaattctgtttttaatttatcatactctattgctctctctagcaacagcctactttcttcaatcctttttttatctgtgatatctctaattgaagatagtatatttaacttgttattataccagaatcttatagatgtagattcaaagtctttatatatattctgtttagtaatgaatttatactcagccctttgaaacattttatccttatataagaggttttctacttgtcgctttataagttcatgattttctttacttaccacttcgtcaagcctttttcctactaattccttagtattatcataccccaacattctagcatatgagtcactaacaaaggaataagtaataccatcgtgaatacttaccccatctggtaggatatcaattagttttttatatagttctttgctctcaaacagtttctcttgcaattcccctctttctgacgcatctctaatagtaatccctacgcgctctttacccataccaacaattggaagtccctcaagtatatctgtatatttctctgccttctttatagcatcagtgtactttttcttcttaatagttgtatctctaagtacaaaaaactcataccaacaattatttaattgcttaatattacactttatatctacatcaattatatttgactgaaagtctttaatcttatgctcaccttcaataactttaaatgattcattaatagagtcactaaatatcgcatcactctttaactgcaatagtgatacgatcgatttacctagcacagattcatcactacaatgtagaagttttcgcaattcatcattagcaaaaacaattttgccacctctctgaaccaatatggcatagggtaaaaaattaaaatactcataatttttattatctatatcaactatatttccaatgtcagatattaattcgtcatcaccgataataactccaccgcacattaacttaatcctccagcatcctagttgtaagtttttatattttatttaaatattctccactctctctaaaactccttctttttttaagttatctaagtttctagttatatttcaagatatcttgccttgagcaaattaatcccgataactttttctattctgcactttttcttttaataaaattaatataagtgccaaaattattgtccttttcagcctcaatatacccacattaatcacaggtttttataataaattttgcagaaaactaaacagaaaaaaggacataggaaaaggaataagattgttttaacgtgacacctatataaatatactaggctgaaaccttgatgtttcctataaatatttacatatgtttatatttttctatttaaatatttacatttttaaatagttttctataaacgtagattcctttttaaatatattcctataaatatatttatctttatacatatgtttatagaaaaatattaaaatatatttatttttcattaaatagaaactgaacacaactctatttttaagcaaaaaaagagcataaattcgaattaagaaaaccgacccgaaggctgtgttctactcgcttttatgctctatcttttattctattttgagttctcttttttactgatccgccacttagtcaatcttttttatttcttagttaatctttttttgacggggacaactattttaattcatgaataaataatccacttcttaatttaggctcaaaccatgttgattttggtggcattacctctccaatatcagcaacatccataatgtcatgaacctctgttggatacatagaaaaagcaatcttcatatctgaattaactcttttttcaagctctttgattcctctgataccgcctataaagtcaattctatctgatgttctgacatcttcaattcctaagattggtgttagtacattactttgaagaattgcaacatcaagttgcgctataggattattttcatcaaacgtcccatcttttgcctctaataaataccattctccttcaacatccatcccaaatgtatgcttcttagcaggctttacaggcacattattttcagatttagttacaataaagttttcctctaacttcgtaatcaattcttctttagtcattccatttaaatctttaacaactctgttataatccataaccattagatcattatcagggaatgcaaccgctaagaaatagttaaactcttcctcaccagtataatttggattttcagctcttcttttaagcccaacctttacagcagaagccgatctatgatgaccatctgcaatatataaataatctatttccttaaataggtcaactatttcgtctataataatttcattatctacaacccatacaatgtgcgttataccatcttcggctacgaaattatatataggttttcttttactttcattctgaatccaagcatctattatttctgatgcaatttgatcttccttgtatgttaagaaaattggcccagtatttgcatcacaataatcaacatgattaattctatcctgttccttatccgcccttgtaaactcgtgttttttaattatattattcatataatcatctatagatgcacagaatacaattcctgtttgagatcttccattcattatttgcctatatatgtataaacaaggttcttcatcttgaacaaactcaccatctcttatcattctatcaagattttctttagcctttgcatatactttaggatcatgtacatctatttctggatctaaatctatttctggtctatcaacatggagaaatgagtgttgatttccaaccaccatttctcttgcttcatcactactcattacatcatatggtaaagctgctatttttgaagctaattccttaactggtctaattcctctaaaagctttaactatcgccatcaaaaattcctcctaaattatagattaaagaattcctttattactgaaactacttcttcacctattcttgtttgagcttctttagttgcagctccaatgtgtggggtggcactaacttttggatggttaattaattcttcattcttagttggctcctcttcaaatacatcaataccagctccagcaatttcacctttattaagtgcttctattaatgctgcttcatcaacaaccttacctctagcacaattaataagatatgctgtattcttcattaattccaattctttttttcctattagtgaaccagccgctttatcataaggtacatgaagtgaaataaaatctgaaacctttaatacttcttctaaagatacaaaatcataatctaaatcatcatgttttccttcaattgtataatatacaaccttcatacccaaagcagttgcctttttagctaaagattgacctattcttcccattccaacgattccaagtgttttacccgcaatttcagttccttcatatttctttttattccattcaccatttctcatagtgtagttagatatcgcaataaatcttgcaagtgcaaacatatgaccaattgcaagttctgcaactgaatctgagcttgctgatggagtatttcttactgttactccttttccttgtgcagcaggaatatctatgttatctattccaacaccagctctaatagccaattttaaatttccgcctgcttctgcttcaaatacatcagctgtaagcttagtagctgatctaataacaactgcatcaaattcctttaatttcgcccccaatatatcttggttaaagtgttcattgacaacttctactcccaatccattcaatgcctcaattgacgcattttctaatccgtcgtttgttaatactttgatcatgtttaaaatcccccttaatttaaatacgcttattgctaatatttctaataaaatttataagcttcaaacaataactaattgttatatcatagttattaactactaatattattagtcagataaattatccgccttttcataatagctaacataaattcacacaattaattataattccactactaaagtgccataaacaatatccaatatccatatcctattaaacttatctgaattgtagagctaaaaaaattgcatagacttaaattccttatatttctatataattctaagcttctgcaccatataaattactctataataaactttaaattttatccttggacttggaatatttatttcacttcttaaatcctatcttttttattttactacttatttggctttaattcaatactttatgggccaaattatgattttaatattgatgcttttatactgttaaatctatgtaaatatttcttaaaaattgcttaatataaatcttaaagtatatattttcaaaatcctagtaatcgagtacttatacttaattcagctggaaacgtaaaaactcgcttgcaccagaatataaattatatttccctaaaaaataaaagagctactctaaaatataagcatattttaaagtagttctttcaatttatttaactaaagtttattattttttgccttctacataagcatttttaaagtagatagtgttcattacagatactctagcgcctttaacataatcttttatacctattgtcctagtgtaatagtataaaggaataactggcatatcattcattaacatatcttctgcttgatgcattatatcaaatctcttttgtggatctaattctttctttgcagcatcaattaaagcatcatatgatggattgttatatccgcaattattttgatctgatgttgattggaacatatctaagaaagtcataggatcgacataatcagcattccaaccatctcttgcaagctcaaattgcttttgaactcttgttgttaagaatactttccattcttggctttgaagttcagcattcacgcctatctttttccacatatcttgaattgcttgcattgtatcaccgtgaccggactctgggttataaagtagttgaagtgttggtaatccttgaccatctggatatccagcttcagctaataattttttagcttcttctacatttccctttggatcaaaataagtagttttttctgtatagtcttttccatctggacctataattccttttcctacaataccatgagcaggaatttggccagccttagtaacattatcaacaattgattgtctatcaattgcaagatttaaagcctttcttacctttggatcacttaaaaccttagcagcatttggatctacagcttttgccttatctgaaacatttattgataagaaatatgttgctaaattagggaatgacttagcacttccatcttttaaagcaccttgtacatcagattttggaactgtatcaactacatcaaattgacctgatttataacttgcccatgctgatgtttcttctgcaacaaattttaagtttaacttatcaagtttaactttatctttatcatagtaattttcgttcttttctaaaactactgagtcttttattgtataatttgtgattttgaatggaccattagaaactaatgtttttgcatcatttgcccaatctttattactttcaacaaccttttgatctactgggaagtagtatgattgtgctgttaactctaagaaatatggacatggagcttctaaagtaacaactagtgtattatcatcagttgcctttaccccaacagcatccgcacttccttttcctttgttataagcttctccacctttaagatagtataatgcataagcgtattctgaagcagtttcaggatttaataatctcttccactcatattcataatcacttgctttaactggatctccatttgaccatttaagatccttttttaagtgaaaagtatatgttagtttatcattagatacttcccattcagcttgacctggaatcgccttttcattctcatccaattcagctaaacctgaaaaagcatttgctattacagtagttccagtagtgtccgtacacaatgctggatctaaagttcttggatctgctcctaaattataagttatttcttgtttacttgcagctgctttatctccacctttatttgaaccacaaccaactaagattgacattccaagtgttgctgctaaagctactgcacaaagttgttttactttgcttgttttcatttatattcccccttaatttattatttattatttatatctgtttaaatcatttttcccaaaattctttaacagtatgctaaatatctaattatttttttatttcttaatcattattgaactttaactaattacttttcttgataaacattagttatcatacaagtggcatgccacgaaatgacctggttttacttcctttaactctggatcaacttctgagcaaattggctttgcatatttacatctacctttaaatctacatcctggcggtggatctattggcgatggaatatctccttcaagtactattcttttgctattcttagccacatctggatccggtattggtactgctgaaagcaatgcttgtgtatatggatgtaatccttcagagtaaactttattactttctcccttttcaaccattcttccaagatacataactccaatatgagttgatatatgcttaaccattgaaagatcatgcgctatgaatagataagttaacccgagttcctcttgaagctcttcaagcatatttataacttgagcttgaatagaaacatccagcgctgatataggttcatcacaaactattagtgatggttcaacagctaatgcccttgcaataccaattctttgtctttgcccacctgaaaattcatgtggatatctatttatatgatcactagcaagcccaacttttgataataaacttcttattctttctgttcttgcttcacctgttagcaatttatgaatatctatagcttctccaattatgtccccaacagtcattcttggatttaaagatgcatatggatcttgaaatatcatctgcatttcttttcttaacggaaccatctcttttactgaattctttgttatatcttttccattaaatattatttgtcctgatgttggctcataaagcttcagtattgttcttcctgtagttgtcttaccacaaccagattcacctacaagtcctaaagtctctccctttttaattgtaaatgaaactctatctacagctttaacatagctattgcctttaaataagcccttttttgcagggaagtatttacataagtctttaacttctaaaattatatctttattagcttccactactttatcctccttataggtgattcaacttccggtgcatcctcatgacataaccaacatgctgcttgatgtttttctcctacttcaaataatggaggctgcttttgaatacatatcttcattgcatagtcacatctagctgcaaacggacatccaactggtggatttaataaatctggtggttgcccttcaattggaataagcttttcctttatatcttctttaggatttggaacgcttcttaaaagtccccatgtataaggatgtttccctctgtagaatatatcttctgttgttccagtctctactattattccaccgtacattacatttatccttgaacaaacatctgcaacaactcccaagtcatgagttattaatataattgcagtattaagcttttctcttaaatccttcattaaatctaaaatttgtgcttgaatagtaacatctaatgctgttgttggttcatctgcaataataagctttggctcacaaattagactcatagcaatcattgctctctgcctcataccacctgaaaattcatgaggatattgcttcattcttttttcaggacttggaattccgaccaatccaagcatctttatagcttctttttttgcttctgctctactaatttttctatgttttaaaagaggctccattaattgttcacctattgtatatactggatttaatgatgtcataggatcctgaaaaatcattcctatatcattacctcttatagtttccatttcagattctctaatattagagatatcttttccattaaaatgtatttctccaccaacaatttttccattgtcagctaggagtctcataatagacatcatagtaacacttttaccgcaacctgattccccaactattcccaatgcctctcctttttctaagtagaaggatactcctcttactgagtgtacttcaccagcactagttttaaaggaagtttgtaggtcttttacatccaataatctttccatatactctttcttcctcctatctcttgtttttaggatctaatgcttggctcaatccatcaccaaaaaggttaaacgctaatataattatacaaatcatcgccgctggaaatattaattgatatggatatgtataaataccaaccattgcttcatttgctaaagttccaagagatgctcttggagcagctattccaaggccgataaaactcaaaaatgcttcagtaaatactgcttcaggaattaatagtgttaatgtaaccattattgaccctatacagttaggtattaaatgccttattaatattcttgcatttgatgcacctaatgattttgctgcaagaacaaattcttgttgctttaattgaagtatatctcctctaactattctagccattccaatccaatacgatatagaaagtgctattactattgtaagaagcccacttccgcctgaacctggcttgtttaaaatagccataaatattattacatatatagttaacggaattgcatatatgatatcaactattctcattaatatagcatctacttttccaccaaagaaaccagctattccaccataaaatactcctattactaaattaataactgccgctaaaaccgcaataagaagtgaatatcttgctccataaaagtttctaacgaacaaatctcttccaagattgtctgttccaaaccaatgctctgccgaaggtttcaaatatgttgatgataaatcatttgctgcataattgtatttagataaccatggaacaaatatagctccaaggattacagctactattacaacaagtgatattatagcaaacttatcttttttcaatctcatccaagcatctttccaataactaatacttggtcttactgatacctcaattttcttttcttcttcgcttagaggagtaaataaatcctttttaacttttaatccattttccatcttctcttcctccctaaacttctgcatcttgtagttttattcttggatcaattaatacgtatattacatctacaaagaaagcaaaaaatactaacattgttccatagaatatagttactccaagcagcatactgtaatctctatttgtaactgactgtacgaattcatttccaagccctggaatcgcaaaaatcttttctgttacaaaacttcctgttaatatgcttgctattaatggtccaatatatgtaactattggtatcaaagaatttctcaatgcatgtttgaatataattgtagttttgcttaagccttttgctttcgcagttcttatataatcagctttcaatacatctattaatttacttcttgtaagtcttgtgataaatgataatggtgctgctgctagtgccatacatggcattacataattctcccattctccaaatccagtcgctggtaataaccctaactgaactgctagtacatatattaaaaccgcacctattacaaaacttggtatagttatgcataatgtagaaatgaacactattaatttatccggccattttccatttttaagagctgcaagcactccaagaattatacctgttatcacggccattcctactgctacgcctccaatttttgcagatgctggaaaagatttagctatagtatctgtaacgcctcttcccttaaaagtcattgattcgccaaaatctccttgaactaaattcttcatgtacatcccatattgctctaatactggcttgtccattccatatttagcttccatatttgccttaatttgtggtgttaacttttcaccatcaaatggtccccctggcataagtctcattagaaaaaatactattgtgattatagcccatatcgttacaaggcttataagaaatctttttccaatatattttaacatgtatttctctccttctttttttattttatataatttattttttaatatttggaaattctgtatgaatatttaaagtttttaataaaattttaaatattttctgttttcttggaagcgcttccacattcgcttaaaaatttcaatatattatggcaatggagtcattaaacaaaactaaaatgtctaataactccgttgttatctatttatcaatatttaatttttactccataaaatttaatttattctcaatttaatactataataataatcttattctctaaaaatgtcaacattatatttgaaatagataatatcaattctatataaatttcataaaatattaccattatgatgaactaaatatatgcattataaatctaaatattcgtgattttaactagtttctaatgatcaatattatattctttccagtacaaagctataacttattattccaattacaatttcttttatatcaaaaaaatatagatcattcttattaaactccatactttttttgatatcataatctgatgtaaaatagtatttatttgtttcttctatatttaatctatctcctcttacttgatgaactttttacaattagattgcataatagattctctacttgttcaaacacttcgctagtgtcgcactctaacaaatttgcaaaaagtccactcaatgttctaatctcactatcaggatatataccctgataaaatttaatcatttccacaaacgtaatataattagcttctccatacataactgtattatctttttttcttaatgcctgcttaattacatctaaatccttcccacctgtatttgcaaaagcaatttctgaataattgcctgctaaaagaaaatcatctaatatctgactactcataaccatttccttgtttataatatttttatagcttctaaatattatttcaacagcttttaaagaaaaaagcctagtatattcagttgctctgggagataaatatgattcaatggcatgaattaatgcatttatagagctacttataagcaggtctagtggtaatttgcttagtaattctgttatcataactgtactatcagcatataattcatctgcaacaaggcttactttcatattattttcttttaattgtaattcagaaacattatttacttcacttccgataccaagtttagttgggactaatactaattctttttctttaattatttctatcttattattgtataaatctacaactggagaaatatttgttaaggaaaatatttttccgatctctaaaatacatttctcgccaatagcaataatcctttcatgagatattcttctaacatgttcatacatactctcaacgatatcctcagacatatttccaattccatagttctctttaaacagaactgctgcctcatttacattaaatttcaagcaattattatatatttcttttcctgtaattatcagatcatctttgcctatgtgaaattccttacaaaaagttttacaatcattatatttatatatcacaggacctagcattaattgtctcataagcacatatctccttatcgtgaaaaaaatgctatatacattgatatatagcatctttacttctaaatattaaattccttttttgtatcttccaatgctgcatccattctctcaataacattatccatatctttttttgaaataacagctgctggttcaaaacggatgcatttagcatttactaaagttcctgcagtcataacgcctcttttaaataaccccttagcaacagagtatcctatatcactttcacgaaactctacagctaacataagtccagtacctcttacctcatttataactgtaggatacttcttccataacatttctaaccctgactttaaatattcgcctttttctttacattgtcctggaacatcattttctagcatatattttattgtagcaagcgctgctgaacagcaaactggatttcctccaaaagttggtgatcctaaaagccatggattgtccactaattcttctgtccacattttaggtctgcatataatacctgttattggcattattcctccaccaaacgccttaccaaaagtcatgatatcaggagttacaccttctgcttcacacctccacattgttccagtcctacccattccagtttgaatttcatcaaatattagagcaactccatattcatcgcatatttcacgaacttcttgtaaataaccttctggtggaatgataatccctgcttcaccttgtattggctctaatataacagctgcaactttctcgcctactgcatatagattacttatagctttccttatatcttctgcatttccatattcaacgtgttgaacttgctgtaccattggtgtatacggcactctgtatgtgctcttcccccccattgaaatagcccccattgatttaccatgaaacgctcctactgttgaaatgtaccatcttccacctgttgcgattcttgcaagctttaatgccatttctactgcttctgctcctccattagtgaaaaagcaatattctaaatctcccggcgtaatttcagcaactgcttttgcaagatatcctcttaatggatctaataattcttgtgaatgtaatgcttgatgatcgagctgtgcttttacaacatcaagtatttcctcatttctatgcccacatgtataaattccaaatccacctagacaatctataaattcttctccatataatcctgtgcaatatgctccctgatctgtccattctacaactgctgcatttgttgatactgattttctgtatttaagccatcctggacttacatagttatcaaaataatttattgtatcctttgtaattgattctttttcctcgtttgttaatccatcgctttttatatatcctataactctgtttaaatcttcaataatttgttctttttgtgccataataattactccctttctaaaattaaaacgacgcattacaatgattttaaatcagtaatacgtcgttgtatttaatctattttctctattgatattattataaatcaaatgccctagttaaaacaattctctcaatgtatggttattgcattattttagaagtacgtatactactttataagtatcttctttccttattagcatatacttacaataatatttaagtatcataaccgcatgtacaatttatgtaatttatggtaaaatacctttaataatctcgcatatttatagaatatttatgcagatataaatattagtaatatatagttatggaaggtatctatatgcaaaataatgaatttctattaataaataatataatttatcagatatatagcattccggattttgacacaatgaaaataacatttttgaacctactaaaaatgttaattcctaatacagcctccagtattttaatggcttaccatactaattcgaagaacttggtatgtgatcccatctgtgtccctgaggtttactcagatactgaaaaaaattaccttttaaatgaagatgaagattatactcgttgggtaatgttgagcggacaatgcctacttattcgtgaaagcgatttaatgcctgaagaagagagagtgaaaacagtactatataagaaatgctacgagccatttaggcttcattactcattacaattaaatctcgtatataatgatttatttttaggagttctcacaatttatcgtaaacgagaagaaggagattttacctccgatgagatgttcattgtaaaggcctttagcgatcatctcaatcttcgcttttatgaatattatacaaaggattcaaaaaattcttccaatatatcgttctctatggcaaatctagcctcgaagtataatttaacgaatcgtgaagtagaagttttacaattaatttttcaggatatgaataatgatgaaattgctaacaaactttatataagtggatatacactaaaaaaacacattcagaatttataccgcaaattcaatgtgtctactaaatggagcttattaaaatttagagaataactaaatacttaaagagaggcaatggacaaccgaaatagaatacatatatgtgttctatttctttgtttgctttccctttacgtattttttaacatacagatactttatttagagataaaaatacttgcctaaatatgctgtcaccttaaatttacaccaaacaaataaaggtaatatatgtttttgcgaagtgtttaaaagtaaacttaaactttcatacaaactgcaagtattttataccaaatttaatgttcgtaccagccaattggtcctggggttaaattgatgtttatttgttttatttcttggtattcttctaaaccgtggacacctagttctctaccatatccactcattttatatcctccccatggtgcttcgttgaaagttggattataacaattaatccacgtgatacctgctctaatttccttaattacttttaatgctatagttccatctgatgtaaatactgctcctgccaaaccatatacggtatcatttgctaatgctatagcttcttcttctgttttaaatgtttgtattgtcacaacaggtccaaagatttcttcttttacaattgtcatatctgaagtacagttgtcaaatatagttggtctcacataatatccttctgcacattctccttctgtgtatctttctccaccacaaactagggttgcaccttcattcttacctatctcaatatattttaatactgtttccatatgttcttttgaaactaacggacccatatctggattatttactggatttcctatagtcattgcatttgctttttctgcaagacgtgctacaaacttatccttaattgactcctcgataataatacgagaacctgctgaacaaacttcaccttgattaaagaatataccaaccatggcccattcaactgctccttcaaagtccgcatccgcaaaaataatatttggtgatttccccccaagttctaggccaacttttttaaggtttcctacagcagctcttgcaatactttgtcctacttctgtacttcctgtgaaagtaaccatgtctatatcattactttcagctatttcctgccctacagttccacctgaacctaataccaaattaacagatccctttggaagccctatttcatcaaatatttcaaataatgcaattgttgataaaggagtatttgaactaggtttaaatacgacactgtttcctgccgcaatagctggcgctaacttccaaactgccattaaaaatgggtagttccatggagtgatttgtccacatacccctactggttcatgaactgtgtatgagtgcatttgcccaaatccatcatttacatcataaactcctccatatggttttgtgattaagcctgcataatatctaaaacaatgaattccgtcatctatgtcaccttctgcctcacgaagaggttttccattatctattgtatcgagcattgcaaatttatctcttttttctgctatcttatctgcaatttgtaaaagaatatcagcacgagcttgtgcattcattctcctccattcaccttttccataaaaagattcttttgcagctgcaattgctagcttagtatcctcaatcccgccttctgttgtctttgcaattacttgtccattagctggatttattacatctctcgtttttttagaaatagcttctacccattcaccattgatgtacatctttttaatttccataatatctcttcctctcatttaattaatataagatctctcaacttatttttgccaacaatttattttgctgtgaatttcacagattaatttctattaacaattaatttcaaattctaataaaatatctgtagctcccgattttttaagcatattctgaagaatatatatggtacagaatacttattcttaagaatatttatggtaatattccgaagaatatatattctaatattctcaagaatatttgtggtagaccttattagtttattccatacttatcattgctcccaattccacataagacacttatctttaatagttttccctgcacttatatccaatacttctttcccttttactgtaataactccatttacaaaaacatattcaatgccttctggccttgtgtctgtagctccaaagcatggataatctgctttatcttctattattttttcatcaaatattaaaatatctgcatcagctccaactccaataaatcctttatttattaatcctaagcgttttgccggcatgtatgtgcatcgtcttatagcatctattaacgtgattctatgctgctctcttaccatagttttaaaaaatttaggatatgtccctgcatcttggggatgacctggaactccagcatcgtataatgttcccgcatctgtagagaccattacataaggtttttctaggatttcaaatacttcatattcctctcccaccatgcctatgaccgtatcatcctgataatttcgtctaagttcttcataaatttctttggttaatctcttacctttatatttaccagtcccagctattaagctgctataatcgcatccccacttttctatgcagccttcatcaaaaacagcacttccaatggaagtcgcaaatccactatacaatccgctatctacggatatatctagcccttcggctaaagcttcttctatcatatgaagagcttctgttgccattcccattccaaactggtaagttagatgagatatatttacagctgcacctgtttttctagttatatcaatagcttctcttaagctagaaaggccaccataggagtctgaccttgtatgaattgatactaactttccatattgggctgcaacttttgctagttctaatacttccttccttgagcttccaggaacatattcaagtccgaatgataatccgctgactccaaattcaaatgcttcttcaaggatacccttcatcttttcaatttcttcatcgctggatgatttatatctatcagtaaccccaacttgttctctcagagtaatatgtccaatttgttctatttgattgattaaaaaactatcatacttattgtagaattccttaatattttctggagacattccacaattaccattgtatactgtagtaactcccatggctgctagcactctagcacaatctaaatctccctctacatgagcatgaatatctataatacctggacatactattttgcctcttacatctaattcaatgttaccttccatatcttctcttgttatagcttttatttttccattcaggattccaatattagcaatagtgctcttttttcgctctggatctattatgattccattcttaataacaacatcgtatttaatcattaactcaccctcttattcaagttagtaaacctttattccttattatctttatgaacatgaaaataaataaaaggtaaacataccgttctactattctcttattgtgccttaagcttcctaacttgaaatgcagtatttaaagctataattataatagttataaccattattactgtggataaagcatttacttctggtgttactccagtctttaccatggagaaaattttaagtggaagtgttgtacttcctggtccagctgtaaagaagctaattacaacatcatcaatagataatgaaaatgccagcatagcaccagacaaaactcctggcattatgagcggtaacgttactctccagaaagtcacaatcctatttgcacctaaatccatagctgcttcttcaagatatttgtcaaatccggcaagtcttgctctcactgttattacaacaaaaggaatactgaaagtaatgtgagataaagtaatactaattaatcctaaaggaatactaagaactgaatatattgaaagtagagcaataccaagtactacttctggaattactatagggatgtataataatttatctattacatctcttcctctaaatctgtatttacttagccctatagcaccaatagttcctataatagttgaaataatagtacttataatcccaataatcaaagtatttgaaagcgcctccattaaagttctatttttgaagaaggtcccataccattgaaaagtgaaattttcgaaagtaatatttaactttgaagtattaaatgaaaaaataattacataaaagataggaagatataaaaataagaaaacaagataaatataaatatttttaaatattctagatatattctttttctgcatctttgtcattttacatacctcctaagtcgtccatattaccacctgatttttggtataaccatacaagtaccaaagtaattacaattaaaaatattgaaattgctgatccgagtggccaattcctggcggttataaattgagttctaataacattaccaattacttgagttttacttcctccaagtaagtcagtaacaaagaaatatcctaatgaaggaataaatactagaatactgcctgcaaatattcccggcatcgtaagtggtaaggtaacttttataaaagaagtaataggttttgctcctaaatcactacaggcttccaaaagcgatttatccaatttttcaattgagctatataaaggtaaaatcatgaatggtaataacatatatactagacctatcattaccccggttgtattatatactagttgaagtggttcattaattactcctaatttcaacaatagtgaatttataataccgtccttgcgaagtaaattgatccatccaaaaagtctaattaacgaacttaccaagaaaggaactattaccatagccataaaaactgtcttctttatagttgttttttgggctataaagtaagtaaatggatatgcaattactatgcagattacagtcgtaaaggtcgaaatcaaaaatgattcaccaaaaacctttaaatataacggatcaaatacttgtataaaattatttaatgtaaatccaataacaactccaccataagcccccttattcataaaactcataacgaagacataaataaatggaatagctactagcaaaatcatccatgctgaaactggaccaactgtggttataagaggcatgtttattttctttttacttttcatttaagcacctccttattttgtttggttctctactgtaaatacgggattatctacaacattgaagacttcttggctttgtgatttaataacaactgcatcttccttttcccaatacacatatacttctgaacctattggtagtaattccacttttggagtagtattcatctttatctccattcctgttggaagcataattattgttttattaacattcccaatatagacatgctcttttacttttcctacaagagtaaatccttctatcgcttccttagataatcttatattttcaggccttactagaacataaattatttcattatccataacctgagaatccaatactatagcatctccattttctaattttactcttgataaatcattctctaacttattagcaactccataaaaaatatttgattctccaataaaatctgccacaaatttagattttggcttttcatatatttcctttggtgttcctatttgctctaaatctcctccatacataattgcaattctatcactcattgtaagtgcttcctcttgatcatgagttacataaacaaatgtaattcccaactttttttggagacgcttcaattcaaattgcatttgctttcttaattttaaatccaaagctcctaaaggttcatctagcagcaaaacctttggtctatttataagggctcttcctattgcaaccctttgtttttgtccacctgataattgatctggttttctattttcaaatcccactagctgcactagctcgagaatttctgtaacacgctgtttaatttctgctttgttaactttcttgactgataatccaaaagctaaattatcataaatagtcatatgaggaaatagtgcatagttttggaaaactgtatttacttctctctcataaggttcagagttttgaacctcttcaccctcaatataaatgcttccactagtaggtgtttcgaagcctgctatcattctcaaggttgtagttttaccacaacctgaggggccaagcatagttaaaaattcacctttttttatgtcaataaatagatctctaactacatgattatctccgtattttttatttatattatctattttcacgataacctcagacatttaatcccctccaaagtcttatttttcacccttatcctttaaacttagtccataagtcagttatttttgatacattttctccaatatcttgtaacccttgacttttcttcatttcagcctctgggatattcataatattgttatttttaaagtcgtctcctagaatatctttagctgctttgtttggatttacatatgggaaagtctttgaaatagtagcactcacttctggatctaatatatagttcattagtaagtctgcattctcagaattcttagctccgttcactttcatcatcatatcaaatgtgaaataaatgccttcttctggataaactactttaattgctggattctccttagctgctaaagcgcattcacctccataaacaagtcctaatgaacactcaccatttaataataatgtctttgggctatcaccgttgaatgcatgaatatttggtttcaattgtgttaaaaagtcctctgctttctttaatccttcatcgcttgtatcatttatcttatatccatttgtcattaatccaatcccgactattggtctggcatcttcaacaacaaccatggtatctttatacttaggattcaataaatctttatatgattttatattatccttaattttatctgtattaactgctatcaatatgcttgtacccaaataaggaatactgtattcatttttaggatcatttgcttcatgtaaatattgctcatcaatatttttgaagttctctattttacttgtatctaatttttgaatcaaatcttgagattttagtatatcaatatcttgagccgggccaataatcatatcatatgtccctttacttcctgatttaacttttgcaagcatttcatctggatcagtgaatgtagtcatattaactgtaactccatacttttcttcaaaaccttttaggacgtcatcaggcagatattcggaccagcagataacatttaattccttactttcaccagaattttcacctgtacttccattagaagttgattgagtatttgaaccacagccagataaactcattgttaccatgcatcctattgttatacttaatataagtttctttaatataccttttatcatctaaatcactcctctaaataaaaatagcttttatgcttataatttcctaactcttctatcatgagctaaaacaaaaaagtgcataaagatattcatacctttatgcacccttgcatctaaatatttataattataaagccttacttcctctttcacctgtcctaatacgaacaacttgttctatatttctaacaaaaatttttccatctccaacattgccagttcctaccttgtctattactgataaaataatatcttctattatattgtcctctactactgcctcgactttaattttgggtaataaatttatatttgtttttaaacccttaatctcatttacaccttctagcgagcctctttgagttccacatcccattgcggttgatattgtcattccaccacagtggtattcatccaaaatacttttaataatttctaatttttccggtcttataattaatactatttctttcataacctctctcctccctaattgcaaaattatatacaaaattccatctaaacaactatttcactacttcttgtgaataatatactatcaaaatctttttataacaattcaccaaaaacaccattttaattatcctttttaatatatagatacccctaaagtagtattctcatcctctttctttaaccatcttaaatagctgaactctattcttaatacctagctttctatatatattaagtacatgtttctttaatgtattatttgtaatgcataatttattgctaatctcactgttctctaatccattcattagttcacataacacagcttcttcccttttggttaatccataagtatctacacactgggaaatagatattttttctccacccatggaattattatttagatcctgatatagcctaaaggctaaatgttctttaataatatcaagtacaaaagaatcctcatatataaaatcttcttttccttttattctaaagaaacatactacaccaacaaactgatttttgtgtgccaatatcatatttagtgtatgatgccaattgttaggttcaaagtactttttatagtattccgtctctactctctttttctctgaaataatatcactttctctatatactttacttttaccaccaaacattaatcccctgctataatctatactgtcatacttgtccatgtaattttcatctgctctaggcttgtaattgtaaaatactggtttaaccaatgtatgactatttaattctgatgcaatataaaagtcagcactatcaaaatctaaaactaaagccatctgagtaaggaaattttttcgcatagtagtagaattctcaatagaattaatctgatatactatattgttaataaccatccaatcatttgtttctaaactacgcatttgctaaaacttcctttcctaaagtattgaataatataaaataagaggcatatgtaattctcttaatgagatatttacatatgcctctttgcacatatcaatttacttatacattattttactctttcactattcgtctttcaacattatcatttgattattttttatactaagcatactcctttaggagtacatttaaagtaattataaagttatattttaattctcttcatcaaaatataatactgattcagtttctctacaatatttaacacacatacattgtgctaattttcttgggcacttataacataaacaagtcagatcctttccattacatcttccttgctttagctctccacaatctccgcaatttactccatttcctgctggcataatagtatcactactcctttaactttatacttacattattattaactcaaaattaatgaatgtcaaattataagccattaataaataaatagatagcttttttgaaaagctacctactttttcacttaaaacatataagatatcatttaccaaatccctattctatcccccggcttaacatacataccatctttttcagtaattccatatgtgtcatagaacttttgaaattgtggtaggactgcatttactctagccttattaggagagtgaacatctatgattaatgcatatgttgcatattcttttgttgttatttgcctccaagtaactgcataactttcaaaaaacgctttataatttgcattattcatttcgcctagtatatctaaaagacaggatactccacctatatctgcaatattttctcccacagtaagattgccatctaacttttcaccaggcattgcttcaatctgactataaaaatttgcaaccttttgagttttttgcatgaattctttataatcctcttcggtccaccaattattaaggttaccatcagaatcatattgagctccagtattatcaaaggcatggctaatttcatgaccaataataactccaattccgcctaaattaacttccttaggtgcatttacatcataaaaatggccttgaattattccgcctggtataataattgaattttctgttgcactataaaaagcattgactgtttgaggtttaaactgatcttcatctttatccactagtttgtttattttattaaacatcttatcacgctcaaatattctaagtgtcattgcattttggaaaagtgatccaccttcttcgtatgatttaatatctaactttgaataatcattccaactgtcaggatacgctatctttatctttaacttatctagcttatcaatagcattttttttagtttgactactcatccaatcaagattatcaattctctttttgtaaactgctataatatcctttgttatggactctacatcttttttagtcttttcaggaacatatttttcagaataaagtcttccaatagccattcccatcatagaatttacattatcaacggcctcttcctcttttgatacattaccagttatgcctagcatattacttgcgtattctttattggcattttcaaaatcctcacttaaataatttgatgcatatagtaaattaactatttcaatataatttttaatgagaggtaaattttcttgattatataatttattaaatgctttcaaccattctggatcttctaaaataatcttattagctttgtctattcccatataattcataatttctggtagatttaaattaggagctaaattatttaattctgctactgtatatacattatattgttcatcaatcaaattcttagttgtagccttttccttttttcctttaatatacggagctaccatttcttcaaatttaaacatatcatcaacttttttctgagattcttgttgagtatatccacttaacatcaatattttattataataatcttccgttaacttacgctcttttttgctattctctgttggattagtatattcatctgaatcccctaaactaagcgcaataggacttatataaagtatatttgttttcacatcttttatatctttttctacagaaaactttattgttgagtttaatatcctcttatccttccagagcttagtaatatcatctattgttccaattgatttaatttcatctaaattttcctttactggttttatcccttctctatttcttgcttctatatttaaagtattattgtaaatatttattattttcttctcatcactattttctttatacgcatccttattaatcaacaaattgttaattatatctttgatttgttctgttactttattctcaacatcatcaaaagtagacgcagtagattttccatcttcaattttagcatttttaatccaatcactatttactgcatcataaaaatcatcatttaatcttactccttgactattgtttgttactgatgattcctctgccattgcaacattatgtgatccattagatacaaccagcataaatgctactatacttgctactatacttaactttttaatttttttcattactacacctctctttcaggatagctttttataattagcttttataacttactattaacctctgtttatattacatgtgcaataatatttattatgtttcactaataaaaactactccctagcccctttagcttatgaaattcttagtggtttgccttgtccagataaatatatccatataaataattggtatcatatatttctctatacctaaaagttacaccattccaagttgattctgatatataaattttaccaccatctattttttcaactattgctacatgtccatcgcctccagaattaggcatgttagatttccaaactgcaatagctcctactctaggttgagaaccatactggtatttaccgcttttttgatttgcgtcccaccattcataggcatttcctataaatcctgcatcacttggctttactcctgtaatttcccaagcgcgtccccaagcataccatgtacaatttcctttaatcggttttcctccactataaaatggtggcgaaagtttaactttataaaaaagattatcatcagaatagtaatacttattatctgtacttggctgtgtattccttatatcactaagcgaactactgatcgcattagaatttttattatctactgatggagtatctacactagaattaggtatattagaagaggttggactctttgttgtatcatcttcaggtttattaaacgtgacccatttagagcttacccatcccctttttccatttattattatgggatagaatccattcttttcatcatcaacaattttaacctgtgcacctctgtatatattgtcaattatatctgacgaaattgatgcatctgatcgaacgtttaatgaatcattatttgtcgcaacatatgcaatacgagaattcgtgtcatcctttacaccatttacattctctgatccactttctatttgctcagtattaccatttagcatttctccgctatcagagaaagtataaactttgccacttatgcctaatgttccagtttccatttctccactaaaattagtataataccaagtgccattgtcatttacccatcctatgctcattaccccatcattattaaagtgataccacttttcaccaacctttttccaacctatagtcatctctccactattagataggttgtaccattttccattatcactaagccatcctgttttcattattccatctgtattaaaataataccacttttcatcaatttctttccaaccagtaattttaatatctccatctaaccaactccaaccattgttcttatcattaatccatttagctgatgctgagatataacacatgtttgttaccattagagttgtcattcccgttattataatctttttaagaaattctttgttcactttcttttccccttcataaattatttcttatacgtaactcataatatactcttttattgtttatacataaaaaattactatattaatttcaatataaaactaatctcaataagttaaaagagtccccccttggaaaataaataatactctaggaattttaatccttatacattaaatattaactcaaaatcacttaattaacaaacataattataattaaaaataacaaaatctgtatttagaaacataatgaactttttatatttctaaatacagacaatctttgaacaattattaaattttgcaatgtcaaaattctctaaatgaaaattctaaaactcaattaaagaaataaccttattataatcaaaacaataacaccaggaactccaaaaaaacctgctatcaaagcggtaattggattaatcgccagcgaaaaattaacatttatgcctattaatccgagatttgcaattataaaattagctaaatataatattacaacgcctatgataccatttataagtatttttatcggccattttaataatcttatcattaaaaataataatattatccctgctaatccatatattaaatattgtccctccatatttagctcccccactttatttattcaacaattcgtacattattttctactacataattatgttctactcttatccccttttctcttgctattgataataagtaatcatatctttttcttgcaacattctctgaataaatagctacttctattaatttgtcatcgttaacattattaaacatgctacgagccacatttatttccatttttgcaatttccatatcatgtaataacttagcatacatagttgagtcattagtcttgttcatcaggtactctacaatattttttttattcatgtaaatccctccaaaaaacttcttactaccattttatccattcaatggtaaaaatatacataatttgatttcataatttattttaatactgtaacactttttcaaatttatatatattatacttaagaagcttttcactcatgcagatagaaacttctaactcccatctatgtaacactttttaggaacctaattttatttaggttcctttattttatatctcttttcttccctctagtgccttagataatgtaacttcatctgcataatctaaatcaccaccaacaggtatacctgaagcaatcctagtaactttaacatcaagaggtttaagtatcttagatatgtacattgcagttgcctctccttctatattaggattcgttgctaatattacttcctttacatcttcgttcattctagaaacaagctctctaattcttatatcttgaggacctcttccttgcattggagatatatttccatgtaatacatgatatactccattgtattctttaaccttttccattgtcataatatcctttggctgctctacaacacatattgtacccttatctctattaggattcccacataatgcacaaggatctttatctgtaaagtttccacataccgagcaatacttaaccgttccttttgccttaactaatgcatccgcaaattccttaacttcatcatccggaagatttaatatatgtaatgttaatctttgagccgtcttttgtccaatacttggtagcttggcaaattcttctatcaacttttctatggctactggataaaactccatcataatttataattctcctttatctatatttttagcctattataaaaagcatacaggctgaagtttcttctacactcctgtatgctaacttattaataactattgaaattcttagaataacccgcctggcattccgcctgttagtttacccattttgcttgaagtttcctcttctgcttttcttagtgcttcattaacagcactcattactaggtcttcaagcatttcaacgtcatctgcatctacaacttctggttttatgttaattgatgatacttcttttttaccagttacttttacaactacagcaccaccacctactgatgcttcaaattcctttgtctcaagttccttttgcatatcttccatttgcttttgaagcttttgtgcttgcttcataaggttattcatatttccgccaccaaagcctcctggaaatccaccttttgccataaaaaatcctcctctttcttgaatctcattcattaattataaaacatcttttattaatactcaagtttaatgaataagtaacttcttattcatcatatatttcaaatggtattccttctattgtttcttttaataactcttcttgatcttttacttcattatcattttttactacataatctacaattactttttcctttagaacttctgaaaatacggtattcacaatttctctgtattctgccttctgcaacctatctttattaaatgcatacattgaatcatattcaagtgtagctataccattttttaagctatatggctttgctgtaacgattgaagcataaacaatcattgccctctttgccttgaacttttctaatatttctgtccatactctcccaacatcatctactgttaacgatgaatttggattagcttctaaattaacactgttactatttatgttacccttattaatagcatttctactttgattattatttgaattagttcctatattattatgtgcagattttaattcttcattaatattttctgattgaaccattcgaatcttgccagtttttaatgattcctccaacttgtttattcttgataaaataacctcatttgaagtatcatactcaattttacacatctttataatagcaagctctaaatataatctactttgcttgctagcttttgaatttgtttccgaatcctgaagtattctaatagctctcattatttcttctactctaatctttcttccctgttctttaattaaatgaatattttcaagagacatgtctaaaacttcttctggattatttgtaacctttaccataagtaaatttctaaaatgtgctattaaatctttaatgaacaattgcatatccttaccagaataaacaagcttatcaattataatcatggatttttcaatacttctatctataatggcataagttatgtcaaacaaatattcatttgtcacaagtcccaatatactaactaaatcttcgtagttaattttatcttcacccatagcaatcgcttgatctaatatacttaatgcatctctcattgcaccatcgcagactcttgaaattaaatccaaacttttttgctcataagttattccctgagaatctgttatctttttaagtctgctagatatttctttttggcttattctcttaaaatcaaatctttgacatctagatagaatagttataggtagcttttgcggatctgttgtggctaatataaatattactctcttaggaggctcttctaaagtttttaagaacgcattaactgctcctactgaaagcatatgaacctcatccattatatatattttatacctagcttcctggggcggatattttgtatcatctataatgtctctaatcttatctataccattattagaagcggcatcaagttctgttacatcaattgctaatccctcatttatttttctacacatctcacactcgttacatggttctccattttgtaaatctagacaatttaatgcctttgccattacttttgcagttgatgtttttcctgttcctctagttccacaaaaaagataagcatgtgcaattctatcgtttaaaatttcattttttaacgttgtagttatatgttcctgtccaacaacgtcttcaaaattctttggtctccactctctatatagtgctgtataacccacgggataccacctcgccatttctcttaaatataacattattatacactattgcttgtgcaatgcaaaatacacaattagttttatattacatatatttgaataaatatatgtaatataaaaatctttaaaaataaatactaatagtttcttgaatttacactccttctgaagaccatatacttttaatatgcttttatataaaatatattggatgacttgttaaatactttaggttaaaatgtatattgaataattttattataaaaataatttttaaatataaggaggcatatctataatgagtttatatgatgataaatatttagccattgctaatgatatattagaaaatggttacttcgataataacagaactggagtcaagacttataaactacctcatcaaattatgcaatttaatttagaaaaagaatttccaatactaacaacaaaatttgtggcatttaaaactgccgttaaagaacttctttggatctttaaagatcaatcaaacagtgtaaaagaacttcaatctcaaaacgtaaaaatatgggatgaatggatgatggaagacggaactattggaacttcttatggttggatagtgaaaaagttcgatcaaatagataaattaatagatgcattaaaaaataacccacaagatagaagaatgatgattaatttatggcagattccatacctagatagcgctcctttatatccttgctgctttcttacaatgtgggatgtaacagatgggaagctcaactgtatgcttgttcaacgaagcggagattggggacttggtgttccatttaatacatctcagtatgctgtattagttcatctgttagctcaagttactggacttaagccaggattatttactcatgtaataaataatgctcatatatacgaaaatcaagtagatggtttgaaacttcaacttacaagaaaaaatgatgcatataatgctccaaaactttggatcaatccagaaattacaaatttctatgattttactcctgacgacataaaattagaagattataagcatcatgaatctataaaaatggacgtatcagtataattaaatttaaggcatatgaaagaaaataatatactttttgattgtgcctaagataggtgggataataaatgatttcaataattgttgctattgctaaagataatgtaatcgggaaagataacaaattattatggcatatttcagaggatttaaagagatttaaaaaaataactacaggcaaaaaaatgattatgggtagaaaaacttttgaatcattgcctggaattttaccaaatagagaacatatagttctaactagagataataattttaatgtagattcagataaggtgacaatagagcacgattttaattcagtacttcaaagatattcggagtgtgaagatgaagtctttgtaattggaggtgctgaaatttataaacaatttctcccttatgcaaagaaattatacttaacaaaagtagatgaagaatttgaaggcgatacatatttccctggaattaattattcaaattataatactgaatacacatcagagaaatttattgatgaaaagaatggattgcattatacttttgtaaatttaatacaggcataaatatacggtaatatcagttttaaattcatattactatatcataattacgaagaattacattctattttagaaatgggctacaatacaactttaaaataaaaaatctttagaattggggaatgtattatgaaatttgtaacttttaagcatgaaggtatagagcaagtaggaatactagctctcaatgagcaaggagtttatcctatgaaatctcttggcattaattatgatagcatgatcagtttaatagaaaacataacagatcatgaaatggatcttctacaaaaatcattaactaataatgataaggaatatatctccatagagaatatttctaaaatgcctccaatacctaatcctaatcaagatattatttgtttaggtatcaactatatggaacatgcagttgaatctgctcgatataaaaacgaagcctttggtggagatagaccatatgcagtatatttttctaaaagagttaatactgcgactgctgatggtgattatatccctagttatccacaaatagttgatagtctagattatgaggctgaattagcagtgatcattggaaaagacgctaaagatgtacctaaagaaaaagcttttgattatgtttttggttatactataataaatgatgtgagtgcaagaaaccttcaaacaagacataaacaatggtattttggtaaaagtttagatggttttactccaatggggccttgtattgtcactaaaaatgaatttgttaatcctccagtattaaggatatgctctagagttaacggagagctaagacaaaatagtactactgatcttatgattacttcaatacaagacgtaattcatgaattgtctcagggaattactttaaaggttggaactattattgcaatgggaactccagctggtgtgggcatgggattcataccacctaaattcctaaagactggcgatatagttgaatgcgaaattgaaggtataggctgtcttaaaaatattgtaaagtaaatagtaaatttaaataaataataaataggataagaaaatgagggtatttcattgctgaaatgccctcactttcttatcctattgtgtcctatgttaatcctattgaagaataacctaattaatttttcatttccatgctataattaaacattaaaataaaccatgcacctcgcttcgttattagttttctatacgttactaatgcagttagctcagaccagattgatccacggcacatggaaggaaccacttatcgctgcttccttccagatctgacgaggttcatgggcttccattgcgtgggacccagtcatcaacaccacttacaaaagtcagactataaatcgctaatacctaagcgaggaattcaatcctgctatagcggattgcaggttacagggcaccgctaactccccatctagcatggcaatggtggaatgataagggtttgcaccttaatttctcctattgagaaaatcgtctcttctcagacgtcaaaccatgttaatcattgcttttatcaaaaatatatttttaaaattattattaatttattaaatgtcatttttgatacttgttaatgataacacataaaaagtctaaattcaagaacattattactgtctttatgttaaatttattccatacataccataatacaataacaaaattaaatttatatcaattcttccctcatattttttatttaaataagccttaaatcttttcaaattaaagattatctattcttcaacaagaatgatatgctctttctctacgccagctaaagctgcaaatatttcaaataaattgctgtcattaacctgatttttatatttttcataatatccaacagcatgttcttctttttgctttgctaattgtaaaagtgcactatcactatcatatctatcatagctaactttacttaaattaggagcctttataaaatcacctagtctttggtgtattcttgaatgacatatttctatttttgataatgctccaaatacttttttgactttatcatttttagctctcatagctgccgtgttataaaagtcaccattaaagagctcaagcttaacagcatgatctaaaatcttcaaagtattttcatcaaacaagtcactttgtactgtaattatttcgttactttcactcaaatactccttacctacaccacaaaatggacaatgaataatattgtctatcgaattcttattaataaaagcttcttcattaaaattaaaatttatttcatttatttccataccacatattttacacttcaaatagtccatcccccttaaatttcatatatattttaacatacttttcatagactcattgctttaatctcatctttttttagtttttttaaataactattcttttctaaattgatatactacatactaatctagctaaggcaactccccctatgcttaaaaatacatttaataaaatgttagcaattccaaataagtatcttccgtcgctaattaaatttattgtttcatagctaaatgttgaaaatgttgttagcccacccataacacctgttgttaaaaaaagctttaaattgggcgatatcaaatctgttgaaacacttagttccattatcattcctataaggaaacctccgactacgtttactattaatgttcctaatggaatattagaatttatcatttttgctgattgcatggtcactaggtatctcattacagctccaatgcaaccacctattccaacataaataatcttttgcaaaataatctcctccttaataataaaaaaactcccgccttccaaagcaagagtctttaacatagcgtatatcgtattaacctcgctatatttaatcagtttttcttataaatgttattatataccagagagtttcaaaagtaaattataattaacttttcgaacctaacttgtttctaatataaagtaactttataactacagtaactactaccaacaaaattattatgctcattaattcaagcataaaaaattcttctggtaatgcatttattataggatcagttctaggatcaaatatccagtaattatttctaaagaatattttatgaaaataaataaatgctttggaaaaatcctttgctgatattgcaccaacaaatatgaatattactgccatcatatttacaccactattgaaatttgctataagcctcttttttaaatcatttgatttattagccaatactttaaagattataacgccaataaatattatactaaatacatatagcgctataaatattctcttcacctcaaaaaagtgtatccttccgaattcactcataggtatactattaaactttaattccttaataaacggattctgaacataataaattactcttttatagttatccattaatatttctgttgataatccagtgtattcatttaatttatatctttgtattgcataaccatatatactagttgtatttaaaacacttaaaactataatggatataattgatatcgcataaaatatatctctagaaatccccaaagctattcttaaaacttttgaaactatactcttatttatatgaattcacttccttaaataatctaattcgcctttaataaaaccacttatgattcaaaatcacaaatggttttattataaaaattataaatgttctaaattgtgtttttctccattgaaatattaacctcaatattcatatctccaacacccatttgcacacatacaactttatctgaactcgcatttgcagtaaagtttccatgtacaagagttggtgtagatatatttatattaatatcttcttttgaaaaattagttgctacagttgcagttaacatatttgttagttctgaaattgcactttgagccaattcatcaaattgttcaactggcattcccatcatcattgtagatgctattcgttttgcatcatctaagcttaacccataaataacattacctttaatgtcacctataataccaacaataatgacaactccaggactctctatgaatctacctcttagacttattccctttttctctacatcaggtaaccctaactgtggcaatacacttgcaaaagaatttaatattggatttatataattgacatccattctccttcacctcttccaaagcctatactaattgataaatctccgaactgagtttttgcattcgcagaataagtagtttctaattctgctttcgatatactaattgattctccatggaatgtggttggcggagcaacccttaatccaaatatcctatttcttttatttatcattgaacatgcatttcctgccgccatatttgttatctcagacataacattaagcatttcttcagtattctttacctctctcttaagcaatgcttttcctatgctattagcagtttcaaatgacatatcgaaaattattcttcctgaatactttcctataacccccatgacaattgaaattcccttactaattttctcaacattttcattactttcatgtgtaatcaccggcactgttttagtaagcttattaaagacatctaatagagcctctctaaacactgatgaatataggccttccaattctaaaaacaattcttcatctgccataactctatttattaataatgttaattcttctccatctactggcttttgtgcgtacccacatacgtgattctttttcgcttttcttactatttcatcatccatcatagaactaacaattataactttaatattaggatcaattttatgtatttcccttgtacattcaaatccatcagttcctggcatagtcatatccattgttactaaatccggcttcatatttgtaacaacctcaatagtttcctctaaggaacctgcttcacccacaacattaaatccactttctgtcaataaatctctcaataaagcaatttgaaaaggcgagtcatccactataacaatattcacatttttcataattacaccacctacccctttatttataaatacaatcaacctacctaactttaatatcaatctgtctcacaattctccttcttaaaataaccattaaatttaatatgctttgtaagttaatcatattatcattatattttaaattctactaatactcaacgaaatttctacataatataataaatttatcatattaatacatattctagttaagataaaaatcagtaaattaccctatttcttatttcatatttatattatattttgagcttgtcactttctgtataattaatattccatccactataaatagccctataaactatcttatagggctatttatatatgcttattatttaagttttactaataattcacctgttttaacttgttgtccttcacttactaaaacagattcaatagttcctgcactagatgcaacaatatttgtttccatcttcattgcttctactacaagtaaactatctccttcttttacaccgtctccttcttttacaagcaccttgattatggttcctgggatactagctccaacttctagcttattatcaggatcagccatcttagatgaatcatccttacctgaattactgataattctctcagttttatcttttattttaatttctcttctatttccattgatttcgaaatctaaggttctatttccttcagcatcaagatctccgattttaaccagttggacaatcatggtctttccttctgctatttcaatttcactggtttctccctctgcaagtccatggaagaatacatcactgcccatacggcttacgtcaccgtactctaatatagattttatatatgcttcaaatacatctggatataatgcataacttattacgtcttttttgcatggtgtgaacttatacttttcttttaagtatgtttcaatctttccaaagtcttctggtggtaataattcacctggtctaacagttatagcctcttctccttttaatacaatttcttgtaaatccttagggaaaccgccttctggctgacccatcattcctttgaaatatgaaactacagaatctggaaaggccatattcttagctttttcaactatattttcaggagttaaatcattcttaaccatgaagatagctaaatctccaaccatttttgatgatggagtaaccttgattatgtctccaagcatatcatttacatctttatacatgtattttacatcattaaatctatgtccaagaccaaagctctcaacttgtggctttaagtttgaatattgtccaccaggtatttcaaatttataaatttcagcacttcctgattttaagtctgattcaaactggctgtatactggtcttactgtatcccaataatcagatatcttttgaattccgcttaaattaatacctgtatctctatctgtattacgaagagcagcaacaactgagtttaaagccggctgacttgtaagtcctgacattccattgaaagttgtatcaacaatatcaactcctgcatctgctgccattaatactgtagcaacaccattaccagtagtatcatgagtatgaagatgaatagggatcgaaacttcattctttaatgcagttataagcttcttagctgcataaggtttaagtagtgctgacatatcctttattgcaagaatatgagctcccattttttcaatttccttagctttatttacatagtactctaagctatatttatctcttttttcatctaaaatatctccagtatagcataatgctacttcagctaccttattgcattttaatacttcctctaaagatacctctatgccctttaaccagttaagagaatcaaaaattctaaatacatctattccgctgtcagctgattcttttataaattctcttataacattatctggataattcttataacctacaccatttgctcctctaacaagcatttggaacattacgtttggaattctctttcttaacgattcaagtctcttccatggagattcctttaagaatctataagcagtatcaaaagtagctcctccccacatttcaagtgagaataaatcatttccaaaaactgctgttgcctttgcaatattcttcatgtcctgggttctaacacgagtagccattaaagactgctgagcatctctcatagttgtgtctgtaagaagcagcttattttgattttttatccatttaactacaccttctggaccttctgcatctaaaatctgcttagttccgcttaagccttctaaagatgctatagctggaatatctggcacgtcatattctttcttagtacccttagtttcatttacgatcttttcaccaatgaactttaatactctgtattcttcatcacttctaggccttatatcaaataattgtggattatttgatataaagttagtatcacattcaccttttttgaaggtttcattatttaacacattaattaaaaagtctacattagttttaacccctgaaattgtaagctccttgattgcacgtatggattttctaacagcatcatcaaaagttcttgcatatgcagtactctttacaagtaaactgtcataatatgggcttattactgcgccactatatccatttcctccatcaagtctgataccaaaacctgatcctgttctgtaaacatcaattttacctgtgtctggtgaaaaattatttgcaggatcttctgtagttattctacattggattgcatatcctcttggctgtatatcgtcttgagagtgtatacctacttctgcagagcctaactcatagccttctgctattaaaatctggctttgaactatatcaattccagtgaccatttcagtaattgtatgttcaacctggattcttggattcatttctataaagtaatgatttccgtgcatatcaactaagaactctagagttcctgcacttctataacctacagatttagctattttaagtgcatctacgcagatttcttctcttttttcttgtgttaatgataatgctggagcaatttcgataaccttttggtgtcttctttgaatagagcagtctctttcataaagatgtactatgttaccatgcttatctccaagcacttgtatttcaatatgctttggtccttctatatatttctcaatgaacatatcatcattaccaaaagctttttttgcttcattcttagcatttctaaaagaaggtagaagctcattttcgcttcttactattctcattcctctaccaccaccaccggcagcagcttttatcattacaggaaaaccacatatttttgcaatttcaattgcttcttcttcagaagatataggtttttctacccctggtattactggaacgccaacttctttagctactatttttgatttaattttatcccccaatttttccatcatttctgattttggacctatgaattctataccagcttcttcacatcttctagcaaagtctggattttcagataaaaatccatatcctggatggatagcgtctacatgtttttttaatgcaagatttattatttcgtcaatgtttaaataagcttcaactggccccttattctttccaatttgatatgcttcatgagccttagttctaaaaagagcaaacttatcttcttctgtgtatatagccacagttcttattccaagttcatgacaagctctgaaaattcttattgctatttcgcctctgtttgcaaccagtactcttttaaattttttccccaattaaaatacaactccttcaatgcttattatttttatttcatatgaattatcttttaatgcatgtgttagttgttagaaaccaattatgcaatttttataactcataagttgtcataatacaaattttgttcattaaaaaattaatatattgattataacatatttgacgttaaatgatacatattatttatcttttctatgaatctttacataattctcactatgcctgcaagctattttttttcacaaatatgaaatataaaaaaatttttctttcatttttctgtatttatacaccatctcatttatctaattttctttcaattctgacgtacaattaggacatcttgttgcctgcgaattaatttcggtgtagcagtatttacattttttcttatcaggaacaatattttctccctttttcttagtaagtttgcttatttgctgtataataataaaaattgagaatgctacaatcagaaaatctattatgttatttataaatattccatagttaactgtagccactcctgcatctttagcttcttgaacagttttaaaatttccacttcctaaagtaaaaaataaattagagaaatcaactcttcccatcaataagccaactagtggcattataatatcattaactaaagatgtaacaattttgctaaaagctccaccaataacaacacctatcgctagactaaccatgtttcctttcatagcaaattctttgaattccttaaacatttttattctcctttttcttgctttattgtttaaatgcgtaactgcatcaaacatagactaatcattcataacttattttattatctgtgactttaaattttttattcttgtgaattattttatattcattaattaatgaacatgaacattatcgtgaaaattataactttctacttctattctttattatctatgtgttaatttcaggctattgaaacttaaatataccaaaaaaagaaatgtaataatatccagtttttacaaactacatattcctacatttctacttcatatccctatactcttgtaaattcatgacttttgttttttatattctttaattgatagaccagtacatttcttaaaccaattactaaaatagttaggatcatcgataccaattttttttgaaatttcataagccttcgcatttgggttcttgagcatttcagtaactatctttactttagtatttacaatatattctgaaaaagtctcatcagttttttccttaaaaattctgcttaggtaacttggattaacataaaaatattcagctaccagttttaaagataaatctcgattagatatatttttcactataaattttttaatttgttctatacttaaatttttatcctcagtttcattagcatcatttagatttattatattattatatacaaccatcttttctttaatatccttgtattcttttttctttagatattcatcttgaatctcgtcttttagctttaaaactgaatttcttaattcatcttcatctataggcttaagaataaaatcattcacaccaatctttatacttcttttagcatattcaaattcattgtaacctgtaattacaataacttttatatctggatacctttctaatatgcttttactcatatccaatccatctgttacaggcatatttatatctgttaaaataatatctggcttttctttatttattagattcaatccctcaaccgcattagaagcttcagccactatctccattccaatttcattccaatcaatgcaattttttattagatcccttataagatgttcatcatcaattatcataacttttataatgttatccataaaataatccacttccctttagaatattcgttagaaaacttaatctatttcttaattctaggcatcttaatagttattctggtaccaacattttttttgctttcaacaataaattcgtgctcgtctccatagaacactcttaatctttcctttgtagttcttactccaatgccagtagttttattttcgtttatatttctaacttgtgattcctccatgccattcccattatcttctagcattaatataactttttcttcctcttgaaaggtagatattcttatctttcctttattcttgctgcttctaattccatgataaatagcattttcaactagcggttgtaatactaattttattatcttaaaatcgtcgcatcgtggatctaaatcatattcaacctcaaacatatcctcatatcttatattttgaattatcagatagctttttaccgtatttatttcttcttttacagtaataatatcttttccattatttaagcttgttctatagaatttacccaaggcttttatcatttcatatattgttttattttttccgagtagcgctaaagaattaatagtatcaaacgtattgtatagaaagtgaggctttatttgtgacattaacaaattcaattcattttgcctttttatcttttcatctttacgtattttatccaaaagtaaattaatttgagaaattgcaatgttatatcccttttttaattctcctacttcgtcgttgtacgtttttatattaacaatattaaactctccactttgaatccccttcattgattcactaagcttctttaaaggcattgttataaatttagatattactatagacccaataataattaataggaaatttattatactaaaacacaaaagaaaataattagtatactttgtttgctccggagattcattgtattctgccacagtcgtcagattccagttatagtctgaatttttaagatttgatattatataatctttatcttgtattttttcctctaaaaaaaacacttttgatttagaatcattataattttttattttacttagtattttagagtcaacctctgaacctgttatcaattcatctttatcattctttataatcaattttgttccatattgattatttagcttcaaacttaaattatagaatgcattctcgttcatgtttataattatcaaaccaattttttcaccagtatttatatcatttatttctcttatgagggatacataattattaccataaccctcaaaaaatcctccgccatttaatcttagtatatatttacccttaccctctagtaattcattataccattcagaatttttaatcttatccatctgaaaatccttataaaagacattttcagaataatacttattgccatagttatctaatacatatattgaagatatattagagctaaaattagtgaattgtattagataattactaacattatcataggcaatcccttcttcctgaactctctttaatgtattttgaacattgtcacttgatataatcatctttgatacgttattaacattatcaattatcatgctcgtattagtttctgcactttccaaaacctcaactgaactttgtttcattttttctatattataaatagaatttattttcttatatgcaaaggtaagtatgactgttgaaagcacaaaaattattgaaaaatatacaataatctttatacttatttttgaatttaaatatttatccttcaaattctttaatataaaaaatttattatacatttaatcatatcctcatcattctattttcaccatttcctttgtgaagtcttcaggacttatttgtcctttaaatagcttactaactagctccttctctttgtttcccttttcttctcctaagtaaatatctccgtataagctatatgatgcattctctgttaatgtctctaattccttagataatctatttacattgctcttatcatcagtgtatttccacgctggaagccctgaaccaaattcaaaatatctttttgatattctttcagctataaattttgccgcatcaacagcttcttttttatattttgtattattacttaccattaagtgatccactgctccacccaaaaattctttatcattcccatctccctctttaactaccgggaatttcttaacgattacattgtcctttatagacggatccatattccctatctcaccaatgaaccagtttcctgtataatacataggaatttttccttgtttaaataagatctcagattcatctcttgtaagctccatatttgattcattaaaagcttttgaatctactaattcctttaatctatatgcagcttttaatattgtatcacttttattagcacctacatgcggatcactgactccacctattccaccttcccgtaaagctaagatatcataatagagaattcctgtccaattgtctttttcgcctactaaaagaggtgttatacctttattcctaaaagcttttactgcatctaggaattcatcataattttctggtactttaatatttgcttgtgaaaagagctttgtattacaataaaatgttccaactgataaagtcattggtaatccatatatgttgttattataggttacattattaagcatatctttattaatcttatcttttgtatcttcatctatatattcattaagatttaatacctttccagattctatgaatggcttactaaagccacctccccaagaataaaatatatcaggtaactcgtttacagcaaatgctgtctttatttttgctttatatctttcattttctacagcctcaactttaatttggacattaggattagccttattccattcttccaccgtatcctgaattatccttccattagcatccattgtagtttgtgaccatatatgccacattgttaatgttattttttctttattttctgtgtcattttttttatctaaagaacagccatttaaactaactaaaaatattaaaattataggaaataaaattacttttttaataattatccctccccaaaaaaactgataattaggtcgatgatgatcaatcatttaaattttccttctttaactatatctgtattatgcttttactgcaagtcttcaaattcctcttaaaatataaatatactttatattttaataaaaccaaaactctcttttaacacaactcatctatatagtaaatctattaatgacctcattcaattttactgttaattcactttgattctgcgtattaaaggaaatttgctctacttctttggttacttcatttatactatctaatattttattagaattatttttagatttctctatattacttgaaaactctctcattgtactatctacattatcaatatttgaatttattgcctttaccatgatagcaatttcctcagacatttcatttataaatctagcatcattttcataacttttactagattctatcataaactcataatcatcgcttacgttttgttctatatactttaaaattccttttgaattttctgataaatattcaaatacattttttatttcttctataattccatgaatgccacttacagtagtaatagattcttctgctagctttccaacttcatctgcaacaactgagaaaccttttcccatttctcccgctcttgctgcctctattcttgcatttaaggctaaaaggttagtctctgaagcaatgcttactatagattcacttaaaacttctatttctttaactacctttcccctctctatagcatctttaatttttttatttttctcctcatatatctttctagataattgtatggaatcttcgcttttttccatcatgctacttgatttagtttttatatctactgattttttaagctcttgatttactattccagctagattatttatattttcattaatcttttgaatagataaaacaaatttctcggttgatgaactcgtctgctcagctcctactgctatttcatctgtcgattcatttataaaagaaagctttgagcttatttcatgaacagatgcagctaattcctcagatgatgctgatagttctgttgagttatctaggattgtcctaataagttcccttacatttttcaatgctatattaagagcgtctcctgtttgtgcaaattcatcttttcccttaagtataatttcctctgaaaaattatactgcgcaagattattcgcataattctttatcttctttaaaggtactatcatatttctagtcattgcatatcctaaaactatagtaagcatcaaccctgctattataaaagttaatatttgtatcgctaccttactgtataaatcagcattgttaatattctcattctttgccttaatcgagctatactctaataatttagttagtgatgctgcaaccttgcttcgcgatactgataaatttcgataatctagtatagcttcatcataattattttcctttacaagctttagtaacaaatcacttttttccttataatccttataaatttcattataatttacgagctcattctcttgatattcatctaaatttaaccctctatattcatctataagtatatttccttgttcaaatccttttgaaatgtcatcatttaatttttttatcattaattcatctctatcataaattaggcttaatatgttattatttatttccaatgaatttgcgtttaatctatgtaaaacatctatagatacaagatctgtattgtacatactatctgatgcattattaactttacttaaactctttaaacctatgactcctaccgatgttataattatgaataatagcgtgtatgaaattaccaatcttttgcctacactaaaattattcccaaaattcatcctctaaacctccttgtaacctttagttcaaagcttgattttcatatgtatcttaaatcacttataaatcattccctattaccaattaatatgtatcgttatttaattaaatagcaataaaaagggcaactcaatttgaaaatatactaaagtaaatttgaatacattaatcatttgagttagcccttattaattttatttgtatttaattattatttagtttctgttgtaaattgcttttgtttttcttttccgtattcaacaattttatctggagttacccatttaactggtactggataaacatcatcaactttttcaccttttattttcttatctaaagtatcaattatagttttacctattgcataagagtcttggtcaacaattcctgatattaaattgctacttacaccattttcccaagttggagtatagtcaaaaccaaagtgatagatacttcctgatttaccttgagattttattgcttccattacacctgtatctggtccttctgatcctaatgagaatacagctaccatatcagaatttgaagttatttgtccttctaattgtcttttagattctgctgattggtcattatcttggattggttctaaccactcaaaattcttagcatctgctcccataactttttcaaatccagattttattccatcttgtctatatgtcatagttgtttgagttaagtttactgctgccattgcaattttaccttttgtgatgcccttttcctttaaagctttagcaccattttcaccaagttgttctcctgctagcttattgtctgttcctatataagatgttctattttcttttgtctttacatcagcatcaaaagttactactggaattcccttatcatttgcttccttaaccttcttatcaaacatatctggatccattggagcaatagctattcctgctgctttattctttatagcttcgtcaaggaatcctatatgcttttcgttcttttgtgtttcatttggtggtgaagttttaactactaaatcatatcctaatgccttagcctcatcctcggctgctttcttcataggtgaccagtaagctcctgtatcaactattggaataaaataaataaccttttttccacttgtacttgctgttccccctgcttgtgtctttgttccacaccctgctaagctaccaacaataagcactgttgataataaagcaattattttcttcttcataatttttccccttccgtaattccaattttttagatatgtttttatattttaagccttattcagtagtaaacacttaagcctcaagtctaccaaattacgctcaaacgactttttatgattagccttttttcttaaataaacttccttttctgtagaagtcaacaactatagcaagtacaataacagctcctgttacagcttgttgtaagaatgagttaattccaaggattgctaatccactttggaatacttgtatagtaaatattcctaccatagctccaccgatagttcctactcctccaccgaattgtactccacccatgattgcaccagccattgcaaatagatctggaccatttatttcacttggagcaccaacatttatactagacattagtaatataccagctattgcagctaaaacaccttctattgcatatacctttataacatgcttgtttacatttattcctgataatcttcctgcttccttgtttgatccaaccacatagcagtatctaccaaatcttgtatttttcattaagtaagccattactaatactattatgatgaatactatagtgttagtgtgtattattgatattccaacttctgtgttagaaatattatagaaccaatccggaacacccttgatataaatcccatttgtaaaaaatagtattaatcctcttattaaataacttgtacccatagtaagtataaaagattctaatttaaattttgtaattaatactccattaaataatccccaaactgcacctactaataacccagcaagtaaagaaactggtacgctaaccccttttacagatagataggctactgtacatccagaaaatgcagctattgcaccaatggaaagatcaacacctccagttattattaccatagtaatagcaacagttaaaattcccactgtaggaatctgtcttaagaaatttgaagcatttgctgctcccaaaaagtccgggcttgctattgagaatactaaaataagcactacaagtactagatagattgaatatttgagaaataagtttttaatattaaacccttcctttttcatcttaataccttcttcttgtacaattttattattaattgtttgattcatctttattaatccctccaagcgtagctaatttcataatcttttcttgtgtcgcttcttctctgctaagttctccagtgagttttccttcacacataacatatattctatctgacatacctaataattcaggtaattcagaagacaccattataactactttgccctttctaactagatcattcattatgtgatatatttcagctttagtaccaacgtctattcctttagttggctcatcaaaaataaatatttccgagtccgtatttaaccacttagctagtattaatttttgttgatttccacctgataatgttcctgccataacatcaagatttgctgttttaatctcaagtgcatccttaaatctttctccagtttcccttaactttttatgatttaacacaaaatcttttaagttagttaaagttatattatcaagcacactcattactagagataatccttggctcttcctatcttctgttaaaaggcagataccattattgattgcatccataggtgaattaatcttaacttccttcccattgattcttatcttaccttcacttattttatcagcgccaaatacaagcctcataagttctgttctacctgatccaaccaaaccagctagtcctaaaatttcaccttttcttgctttcaaactaacattcttaactctgccaacattatcactaatattttctacttctaaaacgtattctttaggttcaaaaatctccttaggaaatagctctgtcaaatctcttcctaccatcatatttataagtctttcctgagttatcccttctagttcacagctttcaatataagtaccatctctgagtactgtagctctatcacaaatatcaaaaacctcttttaatctatgtgatatatatattgctgcaacaccttcattttttagtgtttttataactttaaaaaggttttcaacgtccttctgagataacgatgttgtcggttcatcaaaaataatcgcttttgcatttaaacttattgcctttgctatttctaccatctgtttctttgcagttggaagctgcataactaggtcagtagcttttatatctattcctaatttttttattatagaatctgtatcttcgtgtaatttcttgtagtcaacaatacccaaggcttcatttttatatggtagtcttcccatataaacattttctgcaaccgtcaatgtctctgctagatttagctcctgatgaacaaatccaatacctaattgtgcagctttagttggattaataactccacaatcaactccttcaacaaatatttgaccttcatcctgtgtatgaactcccccaagtattttcattaaagttgattttccagcaccgttttctcctaataaagcatgtacttcaccttttttaatttccaactgtgctcccttaagagcataaactcctggaaatcttttatgtatatttttcatttctaaaaatacattactcaattctaaccacctcaactttcactaatcgttttcatgaacattttacaataatatattagttagttatatttaatatctttacttctacatttgaaatttttactttttaaataatgattaaaaagttattaaatctctaagaatacgtttgctaaactctcatcttcaaagcgttaacatcgtttacatttgttattttacagtaatgcattaattaattatatgtaatatctttacctctacatttgaaatctttacttattaaataagttttaaaaagtacttatttactgaattaaaataaaaagagctgctacaaaagtaattaactaagtttgtagtagctcattttttgcacatatttaaagcccggcttgcacgtcgggctttctttatttttgcttttaccatacaatttcacaaaactattccaatagtcttctagtatcttatttattttatcctttttcatttgtatacctcttaattttatagttacttcttaacataccgaagagcctaaagccagatttcatctagctttaaactcttaaaaattctataatttcctatacaattaaattatcctaataaataaatcatacattaaaaattattgtaaaagacagttttggaaatatcctttcttttttcgtggttaggatttggcttagcctcgctacttggataaccaattggtaaaagacatacaggttcaagatttgttggtatattaaaagcctcacgtatagccgcaggatcaaaatgaccaccccatgttgaacctactccaagttcagcagcttgtaacatcatatgcgtagcaataatgcttccatcaatatcagtgtggacttttccgtcatagctgcgttcccatgcttcatttttatcggcgcatataagtaaggctaccggtgcattaaaatgataaattgtgcaagtttgtagtttagcaagagcatcctcactttcaagtaccaaaattctttgtggttgacgatttgcagcagtcggagctaattgtcctgcttttaaaattaaatttaaatcctcctgactgattttctttgtatcaaaacttcttacagaatatcttttggcagctaattctataaatttcatatatacatctccattcatttaagttaatatctttatacctcatctattatgactttgtaaaatgttttatgattaaacttatatatattactttattagactagcccctatttcaaatgccttttgacaatctaaaggaaattgaatttttctatgttctgcttttgcttcttcagagaatacttccattttatattttgagtaatcatcaaattgataagtatcatttgaatgcataactaatggttttgtaaatattctttcaatcactccttctacattattaaaggttgataagtaaccagatttattcattatctcttctgttacattcattgtataaattattgctgttgccatcttctttggagcaattgaagaatgattattatcatatactaaataagggaagaataatcgttctagaaatgatcgtaattgacctgttatatccccaaaatatactggagacccaaaaataatcccatcagcttgagatactttttctaaaacttcttgaagatcgtcttttactgcgcatttcccataactttttcctccaagcctcttgcaagcaaaacagcttttacatccagtatagttataatcatataaattaatcatttcagtttcaatttctttatcttttgcagcttctttcactccatctaaagctttttgaagtaatgtagccgtatttttattttttcttgggcttccattgatagcataaaccttcacaaataacactcctctttttaatgttttatttttctgttataatcaatataacataaaggtataaatatacaagtatgcagttttttctgtgtcagtataaaaagtatactataagattcaaaggagctatacttatgagtgattatatgcgttataataaagaattccctgatgataatatctatgaaacagagtgtcctgttatatatgcacttgatattttaggtcaaaaatggaaattacctatcatgtggtatttatcaagtaaagattctactagatataatgaattaaaacgaaaagttaaaggtgttactaacatgatgcttacaaagtccttaaaggaattagaagaacataagctaattgttagaactcaatatgaaactattccccctagggttgaatattctttgacagaaagaggaaaagccttacttcctacattaaaggaattatatgtatggggcgaagatcaacttaaacttgataaataaatttttaaaatacttcttatttatctccgtatattatatattagcaggtggtttaaatctatattgaaaccacctgttttgacatatgaaccatttatgataatgcaattggaattttaacttatctcccctctacatataaaaaataatcaaaatctgcatacttattcatacccgataagtcctgacacgcaattcctataaaagcaccggtgaaagcccatgaacctttgatagcatcatctgacaatgtacttgcgtcataaactttgcctataggcctccactcgttcttattggtagcaaagaaaaatctaagttgcccaaaattcacttccacttttagataaatacgttctacatcagttatcaagatgttatcatcctgagtcatggactctgataaatcattatttatgctagctagaacccctatgcatttgcctcctaattcttcatccatgcttatcctcaaataataatagttttctgtgttgtaatagcaaattaatcctgcaagctgcaacgttgtttcaggttcaaattcaacacaggtttcggcagaataaacaaagttctgctgacgtcttgctatcatactttgtgtaaacttggaaaacattgattcttttccatataaccttaaaaatcctggcctttcagtaagtgacataaaggtatctgctggaactcttaaggactgaaaatttatatttaataaagtattattaaaatcgtcatactgtgaaactaagacatcttcttcattatttgattcactttcactgtcattgttaatttctatttcccaagaaggtaagttatctgtgtcagaacatagataaagccaatcatcttcacgccattccaccttttgtatagccgtttctcttcctagaatgcagcgatctgtttcaggaagaggccttccacaaagatgaaccataaaccattcattattaggaccttccacaatgcttgcatgtcctgctttttgaagaactttatgcatatcacttcccacagaagtaagaattggattttgtggatgaaccttatatggacccgtaagttttctcgaacgagcaagtgttactgcatgttcataactagtgcctccttcagccgccatcaaataatagtaatcattatgcttatatatatgaggaccctcagagcaacccaaatctgtccctttaaaaatattcattacagggccagtgaggcatttgtttttttcatcatattcttgtaaaaggtgaccagcaaaattattctttcctatacgattatcccatttcatgtttataagccacttttttccgtcatcatcatggaatagagatggatcaaaaccactcgaattaagataaacaggctctgaccactcaccacaaatatcacttgaggttaccagataattatgggtatctttaatatgtccattgttgtttactattgtatatattaagtaaaagatacctttattataggacaaacatggcgcccaaattccacctgaatcaggggttcctaacatatttagctgagagactctattcaatggatgtgctataagctcccaattcactagatctttggaatgatgaatttgaactcctggaaaccattcaaaagtagaggttgcaatatagtagttgtcctcagctttacatatagatggatctggattaaagccctttaagattgggtttttaatttttaacataattctcctccttaagttaagaattttatacataaacagactatataaaatattaaaaggcctgactccaatggactattgaaatcagaccttagcatcataatttttcattatttctcctgtctacttgacagggtgaatttcaaatatgaagtacctttctataaactttcaagatacatatttattataatttagattattaagataactctactttttgtaaagtaccatcatcattgtactttatttcagtgtattttacacaacgtttgttgtctgctccacctgataaagaactatcatgatagaataaataccatttatcttggaactcaacaattgagtgatgagttgtccaaccaattacaggatcaagtatttttcctttaaatgtataaggtccctttggattcttactcatagcatatactatgaaatgtgtgctaccagtagagtatgaaagataataatttccatcatatttatgaacccatggtccttcaaaatatcttctttcttcatcaccagcaagtataggatttccatcttcatcaacaattgatatctcctctggagcttctttaaatgtaagcatatcatcatttaattcagcaactcttggtcctatagcaggtgctgtagcagcaggaccgtctccatctggattaaaagtgccagtttgccatttttctagctgtcctccccaaaggcctccaaaataaacatatgatctattatcgtcatccattaaaacagcaggatcaatgctatagcttccaggtatataactttcttgcgctttgaatggtccagaaggagattcactagtagctactccaagtctaaagatatcttctttatctcttgctgggaaaaacaagtaataagttccattcttataagcagcatctggagcccataattgtttacttgcccatggaatgtcttttaagtgcagtgcttctccattgtcgatacaaggtgaattagtatcatcaagagataaaatatggtaatcttccatgttatattgatcaccattatcgtttgaaatctgtacttggtcaagatcatgagaaggatagatgtagatcttaccttcaaatacatgagcagaaggatctgccgtataaatatgagttactagaggctcgttttgttttgcaatatttttcatatgattctctcctatcttttctttgaatatttatttccatactaacttacatttttataattataatttgtctctttaatatataatttaaatctctatattaattcaatatttgcttccaatggcgctactgaggtaagctcaaggcttctcttatctggttgtgatacccctacaaataatttgaatttcttactatcaagaagcctttctccgtcatcatttacaacttcgaatgatttcttattcaattttattgttacaattttgctttctccttttttcaatgaaacgcgtttgaatcctgctaggctatgatttaatacagcatattttgattctatatcttttacataacattgaactacttcttcaatatcatattccccagtatttttaatctctatgctaatatcaaaactcccaaaaccttgcttaacagaaggcacttgcaaattagataattctactgttgaataagttaaaccatacccaaatggatataaactctcatgtcctaaatatctataagttcttcccttcattgaataatcagtaaaatcaggaagcttagctgtgtctttataaaaagttactggtaatttcccactcggtgagcattttccaaataatatatccgctacagcagttcctccatggctacctggataccatgcatttaaaatagctgcacatttttcttctgcaccatttagtgttaaagcacttccagctccaaggacaacaataactggctttccaacctcaagtactttttcaagtaaattttgttgccttcctggcaagttcaaattctctttgtctcctgccccgtagctattccccgcatccccttgctctccttcaatcgtagagtccaatcctaggcataatacaactacatcagatctttctgctactgaaatcgcttcagataatctatcatctggtcttgctaagtcctccactttatctttaaataagtgacacccttcagagtaatatactctcacatcattaccaactgcatcatgaattccttctaatattgttgtatacttagatgctgttccagagtaatttcccttcaacattatttcgctgtttgcgttcggaccaattactgcaattgattttaaatttgatttatctaatggaagcgttccattattttttagtaataccatggattttctagatgctatcaacgcaacttcattatgttctctagaatcgtttacttcatatggtatcttgttatattcacactcttcatcaaacatacctaatttaaatcttgttgtcattaatctttctgctgctgtagttatttgttcttcagttactaaaccttctttataagctaatagcaaattaagatacatatttccgcagttaagatcacagccattttctatagccaatgctactgattcagttgcagtacttgtaaccatatggtgtaaatgaaaatctgcaagagcccagcagtcagatactacatgtcctttaaatccccatttgcctcttaagatatctttcaacaaagtcttactaccacagcatggctccccatttgtacggttatatgctcccattacactttcaacatttgcctcttttacacatgcctcaaatgctggtaaatatgtctcatatagatccttcttgttaactaccgcattaaattcatgccttaacccttctggtccgctatgaactgcaaaatgttttgcacaagcagctaactttaaatattttccttctccttgcaatccttttatgaatgcaacccctaatctagatgttaaataagggtcttccccgtaagtttcatgtccacgtccccatctaggatctctaaaaatatttatattgggagaccaataagttaatcccttatatatgcctctgtcgtcttttttgctgtattcattgtatttagcacgtccctctgtagcaataatatttgcaacctttcccaggaattcatcatcaaatatagcggctaaaccaatcgcttgaggaaacacagttgctgttccagctctagctaccccatgaagaccttcattccaccaattatactcaggtacatttaagtgctttattgctggtgattgataagttaattgctccgctttttcttgtaatgtcatcttagatactaattcttttgctgcctttactgcaaattcatgagtattttcttgctcaccattcatctatatccctctattccttaaatatttatggagattaaaatctataatacaatattcaatttgtaatttaataatataaaatttatggttgacttaacaagaaagtatttatataattgtagacaaaatttactctcttggaggtattctatgttaaaatacgagtcgcaccactttggagaaaacactcttttttcccactaccatccaattagtcttaattaccctgttcatctacatcgaagcttcgagttcatatgtgttattgatggagatcttcaaatttctgttaataatagaaattttgaagtaaaaaaggatgaatgcatattaattttgccttacgaaatccactctctctcaactaataagtactctgatgctcgtatttgcatattttcccctgaatatgtaaaaacatttgacagcatggtctatggtaaatttctcgaaaatccagtctttaatttatcacataacgcgcgagctcttatactagacaaaattttcagagataatgtcaatgttctcgagatgaaagcttgtctttatttgctttgttctgaagttatggaacatacgcaattacttgtaagcgtgaaaaatgattatgaattattacataaaatccttaactatattcaaaataattttactaaagatatctcattaaaaagcattgcagatgaattttgctacagttacaattacctatccaaatatttaaataatgtactcggaatatcgtttgttgattttgttaatcaaaatagaattaattacgcagcatatttattaaaaaatacagaagacccgattactgatattacttataaatgtggctactcaagcatccgttcatttaatagaaactttcttaagattatgaatatgactccaaaaacttatagaaacttttaatctacagttaattaaataccacataatagcagtttcagtattctcaaacgtctataaataagattactcttttatctattatgtagattttaacttaatcataatgatatactaaaggaaaagtaattttatacgcataagaattatttttatagacgggaagtgttaaaaatgcaaagtaatataaacctctcagagcttgaaaaaataatattgaataaaatacatgagcatatcagcaaaaatgaaagggttggaataaatggagttgcacaagaatgctttgtttcaaaagcagcaattataaaattatcgaagaaacttggctacagcggatatagtgaaatgtattatacaattcttgcctctactaataatgcactcaaattggacttttcgaataatattgttagtacttatgaaagtgagactttaacaattcatgttaatatgcttgtggaattactaagagaatatagcgaaaaaagaatctatcttgattccctaggcttttgcgacagtgctaaggaatattacttacaaaaattattatcatttggatttgatgccgctagcagctatcattacgaagcattcagtaagaataaatctggactttatttttttctttcttattctggggcaaggtcagaagttcttgaaaaggttaacgtagctatagagaataattttaaagttgtagcctttacttcaactaaagattctccattgggcaaaatagctcatatgacaatagaggttgctggaacaaaatcagataaagagcattacctacctaattttttcacttcaaatttaataatcttattagaattagcattaagcaaatattctaataaatatttatcgccacaaagaaactagtgtctataaactcaattaaatatgatatttactccatgaaaggtctgttaaaagtagattactttgtaaaactctttacaatgttcacttctaacagatcttcttatatttgtagttcagtgaactttttcactaaaagtaaacattatcatagaagtggcaattccattgatactctatatattctagtgtattctaaagacaaataaaaggaggtacatattatatgaaagaaaaattattatcattaagtcaaaagttttcacaggccgcagttcaacctgtaatgtttttagcaatcatgggaactggtctcgctattgctgtcattatgcaactcagctttatgccatcatttatgatttttattggaactttattaaagaccatgatgaatgctatgttaaataatctttctattattttctgtgttggactaacaaccgcatttgctaaaaataaaaaagtggacgctgctattattagtctgattgtgtacattatatttttggctggaaacaatgcatggcttacttcacaaaatatgctagctcagcctggcgccatggggttatttggaactgggcaaaaccttgttttaggattccaggtagtagatatgaatgtatttttaggcataatacttggatgtattactggatacgtgtttaataaagcgtctaatatacaattcgtagaaatgtttcgagtatacggcggatcacgacttgtatttataattatgataccaattactttaatattagcaattgtacttagttatgtatggcctgttataaattatggcatttcttgtttatcaatattcatgaaaggcgcaggcgcattaggagtattcgtatatgcatttggtaacagatttttaattccaacaggattacatcatttattatggatgccattttgcttcactggatttggaggaacttcccaaattgatggtaatactgttcaaggcgccgtaaacattttctatgcagaaatgggtagtggtgctaatttaacagctattgatccttcgataagatttgctacttttggatttgcaaaaatcttcgcaagcttaggtatagttcttgctatgataaaaactgcaaaaacagaaaataaaagcactgtgaaaggtttgcttataccaacactcttcgtttcaatggtggcaggtattacagagccacttgatttctcatttctttttatatcaccattactttggttagtacacggattactcactggcttttcagaaatgctactttgggtattaggatcaaggacatattcaatctatggcttacttgatactatagtttgcaattctgttatagatccaaagttatctaagatatacattttctttgccgttggtattgtaatggctatagtatggtacttcacctttgttttcctaattaaaaaatttgatataaagacacctggtagagaggaagaatctcttaataatgatataatctgtgactcccctgaaagtaataatcctaacaatcaaaatgccgaattatttattgaagggctaggtggtgcagaaaatattgtggaagtaaacaactgctttacgcgtttaagaattgatgtaagtgacattaacaaagtagataaagaaataattagtaaagcaaaacaaaaaggtgtcgttattaaagggaataacgtacaaattattattggaatgactgtagaatctgaaaaagaaaaacttgttaatgtattaaacacaaaaaaataaaactaaaaggagtaatgtaaaatgaaaaagtattcaatctgtatcgttggcggaggaagccgttatacaccagatatgctcgcaatgttatgtaatcaaaaagatagattccccttaaggaaaattatcttatatgataatgaaagtgaacgtcaaagtatagttggaaaatatgctgaaatcttatttaaggaatattatccagaactcgaagaaattatatatactactgatgaaaaagaagcctttaaagatatagactttgcacttatgcaaattcgtgcaggaagattaaaaatgcgtgaaaaagatgaaaaaatttcattaaaacatggatgtcttggtcaagaaacatgtggtcctggaggatttgcttatggattaagaagtgttcctgctgttattgacataataaaaaatattcgtacttattctccagaatgttggattttaaattattcaaacccagctgcaattgttgctgaagcaacaaagagagtatttcctagtgatcatcgtattataaacatttgtgatatgccaattgcaatcatggacatttacgcaagtgtgcttggcttaaaaagaaaagatttagagcctaaatattttggtttaaatcattttggctggttcaccaatatcttagataaaaagaccggagaggattatttacctaaattaagagaaatattaaaaaccccagtagatgtacaaacagaacctctttttaaagaaccttcatggaaagcaacctttgactttatgagtcaaatgattaatgattatgatgaatatctgccaaacacatatttgcaatattatttatacccaaataaaatgagagataaagaaaatcccaaatacacacgtgctaatgaagtaatggatggaaatgaaaaagaaacttacgaaagattgcgtgaaattatttctctaggtacgatgcatggtaccaaatatgaaatcaccagtgatgtgggatgccatgcagaatatatagttgatttagcaacagcaatcgcaaataatacaaatgaaatcttcttaataattacggaaaataacggagctattcaaaatgtttcatctggaatgatggtagaggttccatgccgtgttggaagtaatggtgttgaaccattagccgtaggaagtgtacctactttttacaaaggacttatggaaaatcaatatgcatatgaaaaattatcagtggacgcgtgcttagaaggaagctatcaaaaagcattacaggcacttgtattaaatcgtacagttgtaaatactaatattgctaaagaattattaaaagatttaatggatgcaaacaaaggttattggaatgagctccattagaatctagctaattcataacgtatgcaatctatatacttgatcagacaatcttctctgatacttcaaaataaaaccagggtttatttttaaaccctggtctgtttcgaaacaagtgtacttatggggactttaaaatcattttcggactaatcctaaaatattattgttaaaatcaatgtccatgagaaccacctctttcagttattattgtgtgtaatataaaattaaatatactagaatataaaaccatatattccatatagtattattccttctattaaaaagcttataatttttttcatcatagtaatttatatgcactagttaatgctcaatcaatggctcgtaacttccacattcacctttcataataaatttcataaattagcgttgaaaatcctatcataatggatataattgtaataggaggtgtttaaatggaatcgaataaaataaacactagactttctttagtgggggcattgttaggcttaacattattcactatgggtggattattgaataccatcctaaatcgttatataataattatcccaactgtcactataataattagtttgatatccttaatcaaatctaaaaaaactgatataaaaattaaaagttattcttctcttgggttaatacttggactattttactttattttatccttatatgaattattaaaattataaatttgtaaagcctttatattctaatattacacttgcaagagaaaaacatgccttgctattttcacttaagtgcaaatggtaagaacatgttttattattttctggctaatatcattgtttttatatcttcataaaactatatgatttaaagatactaatctacagataatataaaaacatcagttcgaatttttgcgataaaaaaatacctaaatacttttattaatactattcatatattcattaatcaacttatctaactttatactaagctctaataattccttatcatttgtaattatttccttattattaattaatatatttaattcctctctagttctttcaagttcactctttatacccatagctttcgttcttccttattccttaaatttatactttatccatattatacaataaaaatatattaatttcaaacatatgttcgtatattccttacaattatgattatggcactatcagcccccattacggactttcaccgattagtacgtgcccatgctgggcacaccaaaaaaataagagcttatatttcataaactcttattttacacaatgatgtctgaagctcttatatgtcctataaatatttacatatatttatagttacataggaatatagttatctttttaaatatgtttctatgaataaaggtatatatttacctttattcatattaaactttaaactggtgctccaaatgcatattagagcttttcagctttttacttcttagtcttaaaaaagtcaaggcagcaccgattaagcttattactgcagccgctatatatacagttctcatagcatatataaaagcatcatttctccctgctacaagatctgtaacacggtatccaattatagaactcatcatgctatataaaagcgttgtagctaaagctatcccacataccattcccaagtttcttacaagagcatttacacttcctgcaattccaagtttctctttcggtactgttgacattatcaaagaattattaggcgattgaaataatcccataccaatagacataattcctatgaatattattgtgattattacagttgaatttacatttaaagtggacattaatattaaacctaggcttataagtatcaaacctatgaaggttaaaagctctgaaccaattttatctgataagcttccactaagaggtgctactacagttaagagtaatggataaaccatcattattaatccagtatgttctggtgtataattcattacatcttgaaggtaaaatggcagaataatattgttacagaagattgccacaaaagttacaaatgcacaaaatatacttaaagaaaataatttattgctaaatatatttaattgtaatagaggatcttcttttttcttttccacaaaaataaatattataaatgagacaattgcgatggcaaagctcaataaaatcattggatctgaaaagccaatattcaacccttcatctaaagctccaaagagtggaactattgcaaacataaataatacagctcctaagatatctaattttcccttaactgttttattcccattcggtaacaatttaatagcataaaataatgctattactccaataggtacatttatcaaaaaaatatattcccaacttgctgcgcctactattagtcctccaagtcctggtcctattagagatcctaaagctacagaagtacctaaaaatccaagagcttttcctctttcatgtggagggaatgtttctgtaataatcccttgattattagccatagttccagcagcgcctatagcttgtactattcttgctaaaataagtattggaaaagaatttgttataccacatagtaacgatccaagggtaaataatcctaatccgaatgtaaacatcttggattttccaagcatgtctccaagtcttccaaaaatcaatactgtcccagcaattactattaaataacttgttgcaactaattgtatactagatgttgttacatttaaagcagtagccattttaggtaatgctacatttacaatgctaccatctagagcagacataactgtaaacattaaaactattactaatatggaccatttgcttctattttttatattttccataaattttcctcccttgtcacttgtcaatatttaacttacataaccatattaccttaattctcaaattcgtttaatcttcggatattgattagaattttctttaaagactgcattgtaattaacatttctgcttctgatacatcttctgttattaaactcatcaacgtttgaacatcttcatgaattttgggcaatacttctttagctttctctgttagatataatttataagatctgctatctttttcatcttgttctctataaacgtaaccaagatctactaattttgtaattgttcttgcagacattgccttgtcattaccaagttctttgcttaagccgttttggcttataccttcgtttccttcaagattaaacaaatatgggctggaaccactgcttaatccatatttttttaaggccttttctaaatacatttgcttatatctaaaaattttacttgtaatcattatgaggttcatgctttcaacatccataatcattctctccttataatataattgattagtctactatattatatttacactgtgttgacttgtcaacgtttatagtggaacaattttacttcatataatataaatattctatttatattcacataatcttgatcatcatacaacccgttctcacaacagacttatataaattacttttgaataatctttttaattattgaaagcatggtaattgatctcttactacaaagtgataatataacagctcattgtccatatttacttataaacattatcaaatttatacttttaaaatttatcatcttatcatattgcaatataattgattagtcaacaatactttatcatcgtcaagttgactaatcaacctattgtagtattatctcccatccacgctcgcataaagcgttggttgcatcaccctattttgattagaatatagctggaaaattaacgtcttatacggtagtttgaggtatgatttggacaacttaaaaatattaaaaaatgcctgagtgcttagttttacttagcactcaggcattcttcacatcttatttcatggcggagagaaggggatttgaaagctttctcgtcatttctgtaaccttagtttttccaaagctttcaatcctatttttcattatttgattacaatactgattacaaaaaatatggtagattacaatcttttgaggtaaactacggttagtctatatcaatcttcataccctcaaagtcataaaaccacgcttgtaacttattattagtcacatagcattcttgtcctataactttaataggcgattgtttattatctataattttttaaattttgttcttcccatcttaaacatattcattaaatcttctttatctcatattttaatctgcttgttttttgccacctctgcctttatctcagtcatcacttcttcttttaattgttttttaactcttcaattattcctttttccatcatcacgaacactccgaaaaatatatttcagttttaactgatgatagaaataatttatgttaaaaactaaatctacttcatgattcaattctccctattttaactaaccaacttcaaatcattttttacgcacatacctaaaattatctgatgatgcagaatatgttataaacagatatataaattaacgagttgtgctagttatctatacacttacataacaagggaaacaggtctataatttcaaatcttattattagacttgaattgcacactattccctttattatccatattaattggctattgtgagattttcattatctcagctccagtttgcttgtctccaaaatatttaataatatttctatccgcatgattaattatgacaactggaattattgtattaatccctttatttttcatgaactcaaagtctacttttataagttttttacctgtagttacttcgtcaccttcatttattaacacttcaaaaccttcaccatttaaattaactgtttctaatccaatatgaattattatttctaaatcatcactactctttagtaaaattgcatgcttagttttaaaaatttgagctacataaccatttactggtgagcatataatattatcttcaggaattactgcaataccttcacccataattttatcagaaaacactggatctgggacttcggaaatatcaacaattttcccctttatcggagaatatattacaatatcattttttttcttaaataatttactaaacatatataatcacctattccattccaagtaaatctcttacttgagttttataaacatcagcttttgctccatagatgacctgaacaccatctttaaccttaacaactccattagcaccaagtttcttccatatattatcatctttaaccatagacatatcattaacagaaaccctcaatcttgtaaagcaggcatctacacttttaatattattttttcctccaagtgcatcgactatatcattaattattgtattacttgatgaaactactgaaatttcttctgaatcttcttcaagttctcgtcctggagtttttaaatcccatttttttattgcaaatttgaaactgaaatagtataaacaaaaatatattacacctactataggaacaaatatccagtgagaacctttatctgattgcataattccattaaatataaagcttaagaaaggtccaccaaaagctgcacttccaggtatattaatttgtaacaaataagttacaagataagcagttcctgcaaatatagcatgaattccatataatgctggtgctacaaataaaaatgcaaattcaattggttctgtaattccagaaaagaaggctggaattactgctgcaagaaaaaatccccctataactttttttctttcaggctttgcacacttatacatagccaaagctgcccctggcaatccaaacatagattctataactttaccattcatagcaaatctagtgacatcaatattaaacatttctcctggagtagctaactgagcctgataaatattaacagcaccttcaactacttttccacctatctccatactaccaccaagacttgtaaagaaaaatggaagatatacaaaatgatgaagtccaaaaggaagaagagctcgctcagctagaccgtatatcatagatccataagcaccagagtttttaattaatatacttaattcaattaatataccttgaataaaaggccatactacagacaatgctaatcctaaaattaatgatccgataatagaaaccattgggacaaattttgtaccactaaatattgataaaacaggaggtaaagatatattataatatttattatgtagataaacgattaaaaatcctactattattccaccaaaaactcctgtatcaactgttggaactcctagtatatttgattgtcctacaagcagtttatctgggtttattttaccaagattaataagtaaggcgctcatggttacattcataaccatatatcctaaaaaagcagataaagctgcaatacctttctctttttttgcataacctatagttattgatattgcaaagattgccggcaaattattaaatacaattgatcctgatgatttaagcaaactaaaaaacaacttgaaaaatggcatttgcaaaaaaggcatcgttttcattacagatgggcttaaaaatgcagacccaattcccattaatataccagcaattggcaatataagtattggggtcattaatacttttcctaattgttgaaatttagagaaatagcttgtatttgtcatttattcttcctcctaatataataattatttcatattttattagaatattggtactgttttttaatataccaatattctatttaaatcttattatttaaattcaggccaatactccttgttggcttctattaatttatcaagtaccgctcttgcttttttagcagatacgatagttctgttcatagttaatgcctgtaacgctttttcatatgaaccttcaaaataagcatctactgttaatttttcataagctgattgtgattcaattagacctttgtaaaatgtagggattttacctactgaaagaggccttggtccatttgctgtcattatcgaagcaacttcaaccattacatcatcatctaaatttgaaattattccattattttttacaattacgatatatatttttttaagattataagcaatagattcagccacttctatcataaattcactgtgtgcatcattatgaaccatcacagaaccttctacagtaccagctttagcgactcttctacattcttcaaaaactctcttttctcttccatccataacttcatttgctcttgtataatctggatttaaatgactaactttataatcaggataataataatattgtaaataagtatttggaagatattctgggaaatcattaaccatatcctgtaccattgcataagtatctaaccatgatttatctctttgctctgcatctacaggaataaatcccctttcttttattacttttctaagttctggaaccaaatcgtttccattttcatcatataaattagtaaaccatccaaaatgatttaatccaaaataaactggttcaaagtttttcgaatcttttcccaaaactctgccataagaacgtaataaattaactggttgatcacatatatttaaaactctcttatcttctggaaattctcttcttaatgcctctgccactatagcagctggatttgtataatttaatatccaagcatctttagaatactttcttatatcctttattgttttaatcatgtcttttatagatctaagaccatacgcaaatcctccagcaccacaggtttcttgccctattacgcctaagcttaaaggaattttttcatccttttccctcatcttataaccaccggttctcatttgcataattacaaagtcaacatctatataagcttcttcaacctttgtagtgtatctaaaatccaattcagggtatctttcattaaacaatacttttgcataatttgcaattgtttcttgacgttctttatctatatcgaataaaatcaatctatttataggaaacctgtcctttaatttacataaacttgcgagaagtcctggagtccatgtactacctccaccaactaatgatacattgaattttttcatctaaaacatccccttatatatctactgtacaaggtattattaatcccttgtcatagaaattttaacactctttcatgtggtaccattcatgatacttttagtataatgtgatattatcaataagagaagggtttaaacagctttagaaaattttttcacatatagtataatgtacatttatgaaaatattttcatttgtgtgttataattagtaacacacaacatcatatttcttttactagaatggtgcaaaattttgtgatgtttccaattttctgctctttgtgatattcttttaaggaggcactttatgacaatatttgatactattgaaaaaaatagaaaatttctaaataaaaatgaaaattatttacttaaatatatattggaaaacattgaaaaggtatcaaacatgagaattcaagatctttctaaagaaacctttacttccactgcaacaatagtgagattctgtaataaattatcttactcaggatactctgaatttaaagcaaacttgagaaattcaatagatagagaaaataatcataaaaaaatatccgataatatgtttttatttgatgatattgctaaaactaaagatttaatcaatgattctctgattgatgaagtaataagtataatccacgatgctgaaaaaatagatttttacggggaaggttcctctaaagatgtatgtatagatatctcaagaaaatttcatcttgtagaaaaaaactgcagatattttaacgactccagcataatgtattctacagcaagcgatcttgatagtaaaactctaattattgctatatccatgtccggagaaacctcccaggtaatcaaggcagtaaatatagcaaaaacacgaggctgtaaaatcatatgcgttaccagtgtaggttataatacattagccaacttatctgataaatgccttttcatattctcaagtgaatatgaaataaacagcattaaattcaaatccagagtaacagcgaatgccataatggaatatgtgttcttcagatatttagacaaatatctgtaattaaattatatacatttataactgtattatttgccatagattcatcatcatacaaaagccactatagttattgacaatattttcaataactatctaaatataaagaatgcctgagagcttagtattactaaattctcaggcattctttatatttcgttttttaattggcggagagaaggggatttgaacccctgatagagttgcccctatacacgctttccaggcgcaaatttcaaaattacaagcttaaaacgtagtatttctaagcctttacacgacttttatttttaaatatcctcacgttattattgtttataatgttatacttttgtgatactaatgtcaacattttgtaatataactcaaataaatatttcattataaatgataagaatatctattctactacacaaaaaaagaccagcttttactggcctaaaaattataaatctatcgaaaaattttcttcttctaaagttttgtaattagaagttataattgcgaactttccttctacttgattaaatgcggttgtaatatcattaccattaaatgtgattccacttgtatctattttacctggagttatattagggctataaattccatatatcatctttccatcaacagaaacatttctagtttgtattattagattctgattactcttattttctacttgtaaacttacctttttaaaataactactatttttatcagctccaagataagtaatctttacatacttattatcaactaaaactttttgtttttctttgggctgcattacacctttagaatctacatagtacccctcaacaacagtatcagttgcaagcacaccactagtattaaaataataccaagctccatcaatactaacccatcctgttttcatggttccatcattgcctaaataataattatatcctatatttagccaccctgtttgcatcctaccattattgaaataataccatttgccatcaatttgtttccacccaaaagatttaaacccattttctgtccagatccatgaattatctgagttttgtatccattctgcacttgcccctattgggaaaactcctattgccaataatccacataataaacttgctataagcttatttttcattactattcccccttatacaatttatataacataattgtataacacctcatatttttgtcaattattccaattaatttatagaaacaattttttatattttttaaatattatattctaatattatctttcgataattaaatataatcgttcattgtattaaaatgaacataatggaggggatattatggtatgtgataattgtattaaaaacaaaagtattcaagtttgtggtagatgccgtgagattacaaaatatgatcttgtagaaatggttctcggattgtatgaaacacctgaagctatattattaaaaaatcaaagaaataagactggatctcgtagctgcaaaaagccaagcattgatgctctggaaaattctattaagttttactataatcgtggtgatagctatagaaaaattgctgattatctaggagtatctattggtactgtttataatgttattcatggtaaaagaaagaaataaaatatcttttaatttattacataataaaagaaccctatttctaaagttcttaaacttactcattattcttttgtatataaatcagactttttatatacaatattcttatctgtaaattttctcttattgcaatattcaataaacgcttcctcaaaatattttggagctcttggatccaaaagaacttcacttattaaatcattttccattttataatgtattacctttggataatcataattatataaattcttcatattttccgctccaccgccatcatcagtaaccttttcgcaaacttgagctactattttggacaaatttaattttattgagaatctatattcttcttcatgtataaatgcttttctttttgaatatatcaatggcatttcggatatgttatatgcttttatgctagtttcttttggttcactatccgttaatctaaatgcttcataatctattggtttttcatactctatatctccactacacgggtctaaataaatatctttttcagaatctatcaattctaatattgcacttataatattgtccttcttaacttttattcttacaccagttttttgtgggctgtaaattctccacatagcatctgattcatcaattaatttagtccacgattgagcataatatagtttctttttaacttcattccatagtttcaatttttctagagattctttgcttaatttatttttagtgtctgataaattatattcttgaaatttttctatttcatatccttcatagcaatcatcccaaattgtaatattagttaagtacaatctttccaactcaatcaaatctaaaaactgctcgaatgtcatatacttacataagtattcttgattatttttttccactctttaagcccacctttcatataatacaattatacaaaagttggtatattccttctagaaattacaaatatgtagtaaaatatattaaaattcctataaaagttcttaatcaagtttctttgttaaagctacatgcaaacaaaatataaataattataaaaacaagttatttatattttatttcatatttgatataatgtactggaaagcaatacttgttataagcttaatagctgataagttgcttataatttatctaatataaaaagaaaagcttagtgctgcgaacactaagcatgatccattggtactcgaacgtgatcttggccattggatgatttatctaatttttaagggagtgcttataccgcactcttttttgattgtaaaattattttaaaactcttattgtttttactaaaattcatttccaattccacataattattctttaatactatacacgcaagcaataacataccacttgttaatagactatgatccatcgccttatcctctcctttaactatctgttatccaatagccaaagaaaatgttcaagccctaagcctaattatagcatgattgtagctaatatagaataactttctttatctggttcctattaatttatgttaataaaatatactctactctaatacaaaaacacctatatttctatagatgttataacagaatcatattatatagtttctaaaaccgctccatgtgattttattttcaattttaatcctgtaaataagaactactaaaattacttcctactaaatggccacacattatatcagctattttttcaactgattctcttttatgtctatttataaactctttagatacatttaattgagctgccatatctttattagttacttcttcaaagaatatagatgttattatttttagatctgtatcctgcaaaaactctaatgctgattttatcttttttatcttaatttcatctgatttaatatttctttgtaataattgtatttcttcagcacttaattcttctttttctaattttaatttatttactttcaatctatcaattattattttgaactcttttaaatctttcttagtctgttcaaatatatcctttagatccatttatatcaccccactaaaatacttatctatgagattaattttatctataactttatcctgattataccttgaactttccattatagattctactttatctctcatatattccttaactttttctttgccccaggtactatttcttagctttcttaatgcattaaattctatttgaggaatactattaatacttatatttagagtttccgctacttccttatatgtaaatatcttttgataattccacccataacatagctgtaatatttctctttcctttaaagtattattatctaacattgcatcctctaactcttcccttaattgcttaatataaatcttttcttccacattctcaaagccataatcaatgctttcaatagtatcttttaattgtatatcattatcctcctgtataggtacatcaaggcttacacaactattataaagtttattattactaatttctttttcacttcttccattaacacatgaaaatatttctctttttatatattgaaaagcataagtaatgaagctggccttattttctaattcattattgtatttattagctgcattaattagtccaataattcctgcctgtactaaatcatcaaattcaatcattttattaatgccattaaacttatttgcgagctttttaactatgccctcattggcttcaattaggctctctaaggcttttatattgccttgttggtataataagactaattcttcattactcatgtgttcacccctatactatatcttgctttattaactattctctatgttaactcatgtattcgcgcatctattatgtcttccaaagaatctccgtttatcgttaatgtgccatcaacatacaaatccccatcaacatcaacattttctaagaacttagcatatctatcaaacctagatgtgtcttttactcttaaagtatttgttatagtaaaatcatcatctgctactatttcggtagcgttatctgctacataaattctgcttgtataaccattttcgttagtcatggtaagaccatttctatctaatttataagttgcatctccatcatcaactacaaaaccaccatcagcagtacaacgtccatttgtattaacatagaatactaaatgtgaatctttatataatctaaacttaccatcatgtacctctagaccatttgcatctattattacataagcattactagcaccaacacatgccaccttaaaggcacttttagaaagttcccaaccaaatccagtaccatcctgttcaactactgcatcaatcttttcttcctgtaggtctattcttgcatttatttttttctcagaatttgaaacttgtagaactatttcttgcttagtaaatttaatctgctttacggtatcacttataatgtctgtaatatccttcttagtaaaacctatttcaaccgtatcaatagttgtattaccttcactatcaactttataggcaatcttattaactctgccctgtaggtctaaattaagcactttatgccttactgtaactgtgtcgcctatgttaacagtttcaagtattgcataattcttatattcttcagtttggcttaattgtacaaaatcaacctcataattaaaggttatttggtctaccttatcaactgtaaacatcttactacaggcttgtctcataagtgcataagcttcttctatagttacctgatcgtcacctttatcatttgttccatcccaaatatttaaatttaaatctacttccttgcagtatagcttgtcgtatgctccagcatttggactcacaattaaatattctggaagtctataatctcctgactttggaatcaaagctgttgcaaaatcagtaatatctatatcttcctttatgctgcttatgttcttaccatgctcaatgacaactccattgtcctgccctcttttgttaactatatcaagagcattattgctaactataaattcgccaccatattcagataaaacactattctcactaccaataagatcgctaagcaagtttccttcgctgacctgcaatataacatctgtattggtgtttgtgtctaaactaccagctgtataaacatgcgaatccaaagcactatttaaaatagtttgtatagcttcttttctagtttttcctgtaatggttgctgctctaactgcattaacctttaaatcagccattaatttagcctgagcctgtacagtaatagaattagagtttgtctctttttttattaccctaaataactgattttctcttgaatcaatagttggaactgatataattgctcctaaaactaaattatttgaaatacctttactatcatctaatggatattcaagttccagtgtataatctccatttaactcttccgtaactttgcaagatataatctcatttaatacatattcattatgagaaaaatctgtttccctactattaaataatctaaccattaatatttctccttttacattatttcaaatttggtctaaattaatgccaacaaacctatcatatcaagccttaaacaagcttatttcttatcataattaattatgtcacacttgatattctcttcacatagagcgtattaggaggtatcacaccccctttaaaaaatcaattttatcgctctattggaagaagttccactcaccggtctcctattctttacttgttgcatttgaaggtagggggggagcacgaatccccttacttatgttcatattcttcttaataaaagcaaatttgcttaaatacttctttttaattgcaaatatttattcattttagactacaccccctacacagaaactcatgtgcattttttggaggtctactcatcggtctccatttatatttctgtgactatttttagggggggggagtatacaaaacttattcttccaataatttttctgctaaatgaaatgtttccaaacctttattaatatatgctgcatactgtgaatcgtatttagttttaattaattcagataacacattagctgtactagttcttaatattgaaatatcattagcagtattataaagatcatcctgtatatctttagcctgatttaaaagttcttgtctcttctcttccttagcttttctttcatcctgaattcttttttcttcaacatatacggaattaaccaggtccttagctgcgttcatcaactcatctgaatcgccattctttaattcctgtaatgcctctatttcatataacagaacttcaatatctgccccaatctctgatattgtactagttttagtaaacttcttaattgtcttggtaaatattccattctttacttccctttttctatcctctttaatgctttgaatatttcctttaagttcagctaccttgtcctctctttccttaatttgtgattctatattacctataatttttttataattctcaagtgctttattatattccatttctcttatctcctatcctaattaatatattcctattgctttagcagcttcataagtcttttcatttaattcttgttttagtttcgataattgcaaactaagattagttatttctagtgaatgtgctttatttctattttttaaatcttctatttttagagaaacaattttcttttctaatgcattgtattcatctctttttgcttcagcatctttgaccttttttctttgttctaagctaaaattatttgtagttactttcatttatttctcctccttcaatttcatattctcaagtttcttttcccagtaacgctcttgagctgctttgactttgtctttattcttcgccctccattctttcatataagcgtttttttgctctttggctctatcattcaatataaattcctccttaattttccttttttccttccaatgtgataagattatagataattgcgaaactcattgataaaaatgaataatgattgatttgaagttgcaaaaacattattaatggatttaatggttcctgctatacaaatataatagttgacttcttaaaaaagggcgcacgaaataaagcgaaggtgaattccaatttttataaataaattttatgcaattaatggctttaagcttcggatatatttatgtttatgaattttatctgccacgataactgttattagttgagttattccggctagaagtaaatcagcatgaagtgtttgctcattttgagtcttacgctccgcgacgcagtaactatatttgaagtgatttatatttttttcaacagctactctgattttataagtattactccattcttgggttcctcgtgttattccaggatatgcgcgcagattcttttcaggataaatataaaacattcgtccacataaggaatttgtacatggattttcacattgagttacacgtttgctctttttggtttctttgttatataaccatttcattttagggcatacaaacttcattgttggaattctagaacgaagatgacttttactaccttcacgtttcattggaatagaaggatcattcggacagcatggaatgccgtcttcgtttaaagggcaatcagcattttctagtgtaagcctagtttttaaaggaatatatgctttatcaaattttaattcgagaagaagatcacgataaatttgaatactgtcaaaagcagcatctcctaaaaaggtttttggacttattaatggatgcttgttaaaaaaatctttgagaacagggataagagccttagaatctgcaagagatttatcttcatcaggtgaatcagattttttctcaacaataatatcaggatgagcattgagaaaatctttattatagaacgaaatatctcttacgataccgaggccattagtaatgattccgaatttaaaagcatagcaaaaatgcccattaatatacatttgttggatggcagggttggctgaagcgtgtgatggcatagagccataggcagctttataaggatcataagagtcatctaaattgcatgctttcttaaaatttttaagctgttttataatgcgattagcatatttaggattattttcagtgacaaatgcttcaaggcctgaagtatcaaaaatagtcatggaagcaagagccgtatcaatctgttggcatatcggttcagtaatatcaacaagattatcgaacatggattgtaagtccaaaagaaagtcctgcttgaaacgagtaaacttagatgaatcaggaactcttaaaaagccgcagaagtctcttagttcttgagaatatttaaggaaaataattaaaagagaatctgtaggaatagaaaaaatgcgttgtaaaattaaagcactgatcatagcataaagctgatattttcgcggccttcctgtggaagcgtaaaaatggttaatgaaagatgcaggaactaactcatcaaggtcgatagtgttttcgagtaaagaaagaaattggaatttatcattttcaaatttttctttgcaatcagaataaacatctgccaaagaaagctgtttatatgttatcatatatatgactcctttctgaggtatatggtagttttgtttttaggcaattcaattttaccataaatcagtgaggagttattttattttgctaaaaaaatatcccgcatttctgcgggttgcggcgtttcgcaaacgcctagataagattatcttgaaaggaggtgtatttttatgagtgcatatatgattacttatgaccttaataaatctggacaagattatgatgatgtaataaaagctataaaagattcttctattgcttggtgctcttattggaaatcttcatatttaataaaatctaatctcacagccaaccaaatatgtgataaaataaaatctttcttagatacaaacgatcgtcttataatagttgaaactaaaaaaacgaattatcaaggctggttgtctgaagaacaatggaaatttattaaggataatatctttaattaattggagccttaatacctggatcgttttttggatatatcgttccagaactatctattggtacaaacttagactgctcttgatctgatgcttcttgagcagtttttttttctaattcatccattttacaatcctccttccttatattttgataaaataaaaaggccacggtaataaatcacttaacgcataattacgtttagtaaaatttatttcccgcagccattaaattcttaatgctttccatcttttgatggggtactaaaatattaaattgtattaagttatttttatttctatctctatatttattataccatataattagctttaagcatagtgttttcaatggtttaaggggtattttttaataaatattttatattattagtagacagtgtagacaattttaaaaccctactgtctacacttttgtctacctctaaacccgctatattacttatattatatctctttagacaatttagacagtatataatatataaatatataaaaaataataatatatgatatgtaatttgattttaactgtctactgtctactaagctataaaaaatctcgtaccctttgatattactggcctaactcggtagacacttgcatataaaaaaggtagacactttttattgtctacttgtctaaataccgctttaactattgatataactggctttaagtaaagcctcaataaatctacatattctctaaaactgtctactcatttttatagagaaaaaatcccttacttgtttggcaaaggatcattaaaatatttattaaattttataattaatctttttttaatttctttaattcatcttcaattataaattttgcgtaactgtcgattttatttataatttcattgtatataggcaataacttagattcagattcagttattataggattttcattattatatatacttattatattttcatcatctttattggatatatttattttgaaatcatatttttctaataaatcaaataatttttctgtgtcatttttttgcattccaatgttgagtatatcttttattttcttagatataataggatttttgttaattttcttttcattcttacgaataaaatcttcaaattcaattccatcatcccatgatttatatttactccaaaattcaataagttttaattgatcttctatcgctagctctatattttcttctatacaatttcttaaataatttatattaacaccactatcacgcgaaattgctttaaatccatattcttcagatgcatcaacaatagtaatatgctccatctggagcattgatgttattaaattacttgaaaatgatgttgtttcagaatctaacaattcatctatgggaataagtaatgcatcagcaattttaattaatatttctgttttaggttctctatgattattttcataatttgctaaagtagaaactggaattccgagaattttagcaaattccttttgatttatccctttatctaaacgacactttttaatattatttccaaaactcaattaaagcacctcctagacatatcatatcatttaattttcaaaatgcaaatatttttaaacaaaactcattgacaatttgcgtaatgaatattattatataattaagatttgcgtttcgcaaagtttaaggagatgataacatgacatattcaaaattaaaagttgaaagagtaaaaaacaacaaaactcaagatgatttggcaacagatgctaaagtttgcagaactactatttcacaaattgaaaatggcagagttgataatattcaactaggtacattaaaaaaaatagctactgctcttggctcaagtgttgaacaactttttttgtctaatgaaaattaattagaaatcctatcttaaaattctaaaaaatcatatctaataatacaagttagctcctgctccatggctaacacaaaaataaattatggaggtacaaattaatgttaaaaattactatgagttatgaaaatgaaacagataaatcaaaaattaatgaaatattatcatttataagacctactggtccagttaaatccagtaataatggaaaatacaacaaagtttatgtaaatattaagtaaggaaggtattcagtatggataaaactacagcaaaatcaattcaaattatgaaagatcctgtaactcaaaaggatattaaaattaaaataattgatgaacataactattatgacttaactaatgaagttgggtataaagtaataaagcaatattaatcagataaagaaggtgtaaagtaatgcaatttaaattattgaaaaaatatgtggagcaatgccatgagttaggtaaggaagtgacttttaaaggcctttatcattataaaatggcatttaaatagaggtgaatgcctttgaaattaattaaatttactatagaagaaattgacatatgcttttctgcattatcctatatgtttgcagaacttgaagcaagagaaaaatataaaagtttattattagatattaatgtggaatttccgcataaaaatcttgacattttttcagacgctataaaaacctttcagaatgctgaaaatatgtttttaaattttgaaattgttaaaactctttccaaactagaacaatggaacaacttaaaggaatattcacaaacaaaagaaagtgaagtttactataacgcctttatagataaaataactggcaatatagataaactgaaggacatatcacttatagaatttgctgataataaacaagcttttttatcatttgttaatggaaacttaagagccttaattaacagcactgacaagaaaagatttgcttattggaatggtagtacctggtctttattaacagatgaagagacacaaataatttatggagatttcattcaaaaatgtaatatagaactatctgcaggtcaaggttctcttaaatatgaagattggcttgaattagctaagaaaataactaaatgggatacaggcagaaacacgaaagaggccttagataaaataaagcgtgagagctctcgtataattgatttaaagaaatatgatttaaataataatattatctgctctaatgatggcaaaattataaatttaaatactggtgaaataaagaatgcaactaggaatgatatgatacttttcacatcagaatataaccttgttaataaagaggaatcaataaaatttatgtctgagaagatgagtatttatttagacataataggcaatgaaaggcttgattttattcttgatttaatagcttataaaatgctaaatagaagtttacaatcagcaatatttatgattggagcaggtgcaacaggtaaaagtagcctaaagaatattatcagagatctatttaaaactgaaagttcaactataccatatgattatatgacaactatgaatagaggtaactcagacgcatccagagatgatattcttgcttcattagataataaaaaaattgcattttgtagtgaaggagaagaagaaaagataatatcatctgctaaatttaaaaagatattatcacatgcggatgaatctgctagaaaaaccaatgaaggattaaccaatgtaagcttacaaaaccttgatattgtttttgatactaatgctatgccttcatttagtactatggattcggctatatcaagaagattgatttttgttaaatttgataaacctattccgattgaaaaaaggaatgctgattattataaagacgaaatatttcctaattttgattatgttttttcatattttgtttacaaggcaatagacatgatcggtaaaaaattaaatattcctgattgtgtaaaaaatgatacatcaactaaattatcagaagtagactccctattgagtttttctaagaggattataacaccttttgaaggcagttatataaagtattctgaattcgaagaagaatatcttaacttttgcgaagaagaaggcctagaaagtgttataccctacagttttcaagacactggtaataaaaaaaatcaaaccaaacgctgtaattatataattaatcttctcaaagaaaaagaaggcttttccagtatatataaaggcaagcgaatatccgatgggagttcggatcaaaaaacatatcaaatatgtggaataacatttaaagatactgatgatattgttccatttgaagatgagattgaacctaaagaaattcaacaagaagtattaatttaaaaataaaaagagcatatctaaagatacacccttaactcgcaattaaagtgtatcacgagatgtgctctatgtaaaggagaatatttcttcaaaaataaatctatggaggtacactatgaaaaaatattatgacatagatcaagaaacagaaaatatcatagttcaattaaaaagcaagtgccaagagttaaacctagggaatatcaattttagctattttgcagatggtaagaacctaaagaatgatattaatttctatttaacaaaatataaaagctcttgggaattagttgtaaaacaagagataaaggacactcaaacacctggaatgtattggagcgtagcagatgtttataaaatttatgacaatgatttagattacgaatatagcgaaaaagatttgatataaaggagctgcaatgattaatataaaaaatttaagtgatataagaccaatattaatatcaggaaaaggtaataccgaaatagtgaaacttgtaagaaaatatttcaacaacaaaccaccagtatatcgtgagattgtaaagtattactggtatgagatacacactaataacaatgctaagtatttttttcaaatcagcttaaaagaatatgaggacattaaatataaaatattcattgatgttatgaatttagttcaagattattatatcgctagaaagaagaaatatagtggtattaaaaaagttagtgatttagtcacatatacaaagaaagatactaaaaatcttaagaagtggtattaaaaactatataaaataaatttagaggtgataatattatgagcgaatatgaaatcattttagaactatgtagacttttagatgagctaaaagccattttaaaagcgtagattatcaaaaacgtataggaggcttaaattcatgaatgaagctgaaatctatttactacaaatcttagctctactaaataagaaaaagaaaaaataataattgaaagggattgataaatttgtcagaagccgatttatatttatatgagattatgagaaaaagaaatgcaaaaaagtcgaacgaaactactaataactctaaataagtacattgagggaagacaattaaatatcttcccttttcttattttctatttttaaattttaactttgtgcctttaataatgttattttgtaaattatctaatggattatatttgagtaaatcttctttaaaatccaatggaagcaggttaatatatctttccgtagtctttattgtactatggtttaatagcagcttaagcctgtagatatctccaccattcttaataaacatggttgcaaatgtattcctaaaggtattaacaccatgcattttaatattacagtgtttaaagtaatttttaaaattttgatgcattgtatcatatgacatttgagtcccatctattttaggaaatagcaaatcattgtgtttaaggttcatattatttatatattccagtagttcacctcttaaaaactttgacattggaacagttgcctgtcttttagttttcatatggctaaataatattgaatccttctcaaaattaatatctttcactcttacattaagtatagtttcacttctgcatccagttcctacaaaaaatgcaatcattacatatgatctgtaatcacctataacacaagtatttagattaggttttgttagtaaaatatttatttcatcttcagtatatactgcttttttctctagcactacgtttggtattttaacttcaaattcttgtagatattttcttttaaaacaataagttaaaaaagcctttaatttaactacaaatgttgaataagtaccacctttaagtcctctatctatcatactattaacatgaattagaaccatactttcagttattttagttatatcttcatcaacacttatcatttttggtaatacatatttataaaagccttccttgcttttgatagttccttctctctgccctctatacttacaataattcatatattccatgtaacaatccgatacagttctagtgtaattcttgacctctctgaaggctcttagcttaattcttgccattataattctctcctttactttctcattttaattgatttcttattaacaaattctaaaggattgaattcttcaaagtcttgttgcagatccttagtaaacatatttacgtaatttcttaccatgtctaaatcactatgattaagtattttttgaagtcttattatatcaccatgatttaatatccattgcttagcaaaagtatgcctccatcggtgtataccagttctcttaacacgcctaccattattataagttctcatgcttccattaagagctactttgctaattttatctccataggctgagcagaataaataatcttcttcattcccttttctaatggctaaatattccctcaaaattggctgtaatgatttagttattggaattactaaaggtttcctgtttttagttgttttcatacttattaaattattacataaatctatatctttgatttgcagattaattaaattagaggaacgtatgcctgtagcataaagcacattgcatattacccaattcctaaattcaataaaattacatttatttttatttggttttttaagaagtaacttaacttcttcatccgaatatgtttcaattactggcttatcatattttattaaaggtatatgaaacttttccatgtatcctgatctcatgaaataatatagaatggcctttagggctctaagataagtatgtatagttatgtcctttatatccaattcagtctgacaacctataataaagttatcaactgtagccttggttatatcccttattggcatcttaggatcaataaacttataaatactcctcattgaattatcatagaattgtattgttgcaggccttaaattcctagctctgcagctgaagataaactcgtcatagcctctatcaaaggttatacctttagtgctaacttctattatttttcttttcaaaatatctaccacctttacataaaaaaaactacacacgattcggatattttccgtaaataatcgtgtatagtaattttatgcttccataaggtggaacacacctggaagcccctaaatatgcggtggcggagagaaggggatttgaacccctgatagagttgcccctatacacgctttccaggcgtgctccttcgaccactcggacatctctccatattgtatttaatgctttattataatatcatataattgttatcgattcaactgaatattttatatatagaacttctatcatttaatacaatagaatctatttattcatattcaatataaaccatcatccttccattttcgtaattaatgcaaataataggcagaaatacttaaaatttaagtacttttgcctactataaattacttcttatttaattagctataatttagtaataccacaaatttatctcttaaagtacttatatggacttatttatacatatactctctagtccatggtaaatcgttgtttactcctttattgaatacaaattgatgaatacttatatttccggagttaaaagatgctgcacaagcatttaaatacaatctccacattcttataaatgtttcatccttagtcttccttatctctggcaatgcattctcaaaattctttgcccaatgctccaaagttcttccataatgaagtcttaagttttctgcatcgattaaagtgaacctttcatccgacatacaattgattagctctctaactgctggcacatatccgcctgggaatatatatttatcaatccatgtattatttcctccaacctctgttgatgttatgcagtgaagtaaagatacacccttatcatttaataagttattgacatttgaaaaatactctgcaagatgatcttgccctacatgttctaacattcccacactaacgattttatcaaatgttctattttttagttctctgtaatctacaagttcaacttcaataagatcctctaatccttcactttttattctttctttaacttttgctaattgttcagaacttaaagttatgcccatagcttttaccttatatttttttgccgcagatattatcagttcaccccaaccacaacctatatcaagtagtgtttctccttcttttaagtttaactttttaagaatatgctctactttattcttttgtgcttgagttaatgaatcactttttgatttgaagtatccacatgaatatgtcatagtatcatctaaccataatttataaaaatcatttccaatatcgtagtggaactcaatatttttcttgctatttttgatactatttgtagccatccttagtaaatttgcatatttgtcactattactcaaaaaactttcctgattattatataaagattctataaccttttgaatgcttccttcaatatctatttttttagtcatataagcttcaccaaatgttaatgaaggatcctttataatatcggctttaggaataggctcattaaatattattttaaattctggattcccttccccataaatttctgaacttccatcccaaagttttaattcaaaagtatctgaaaataaattcttaaataatgttttgtaaaatattttatcaataatcatgataatcatctccctatttaaaattaattattaaatatagaactttaaacagaaatatgcaaattaaatttataaatagattctaaacaatatgatttaattccaagtgtttttgtgctgcgattgaggctgcactagaattgtggtcttttaaagccttccatatttcttcatgatggtctttaacaagtattttattaatagtatgaacttttgaattttcaatatatttttcaaccaaagaagatatagaaaacattatagttgaaattaagtgattgccagtagcttgtgctattttataatgaaattttttgtctaatatagcacaggcttcaatatctgaattattatttaattcgtccattatttccttcaattctataagttgttcatcagttatatttttagcagcgatagctgctgtttctggttcaattatttttctaagctcaagaacatcctcacttttgcttcctagaagtaagaatacaatagataaaggttcaagcagactattttcaaaattttcattgataaaattcccttccccgtgcttagattctataagtccaagcatttgtaaagattttagtgcttctctaacagatgccctgctaacctcaagcttctcacataaatctctctcagatggtagtttatctccactctttagttctcctcttttaacaatttcttttatttgctctattactatttcatatatttttgtactcttcacaggacttaacatcgatatcatcctctcaaaactttatatgtttgcttttgataagtagttaagtaattcgttgtaatttttttctgctaacagttctttattttttgaattctctattttatgattatgtatactaatattttttctaaagctatccaatgtgttcataatagcaattttaaaaagaggaatactatcaattattctctttattccatatacatattcatcatcacttagtttaaaacattgaaataatccagaggtcaacctcccatcagaaaagatataaatatatctatcgctcatttcatcagataaattaacttctattttatgcttatacagtctaaaaacaacatctctactttttataaatactggaaatatacttgaaaaaagcatcgccatattattatcttcctcatcaattagaccagagaagtcattctcattaagcttcattataatttcatctgtgaatatgctattttttatctcttttcctaactttacttttagcctctgttctctctcttcaattaataaattatcaatagaactaaataacttattaattggactctctccctttttgtagttatttttatctccattcaaagataattccccctaactaatttaaaaatactgaaaataaactccataatacaggtgctatcagtacagtcacaatcccagaaattgcaatagttaaactactcatagctccttcaatttcacctatttccatagcttttgctgtcccaacagcatgtgatgaacttcccatggcaattcccatggctactttatcatttatccttaatattttatataggaatggtccaatgatagaacccagtattccagtaattataatagcaacaacagctacagaaggaagccctcctaactgtttagataatgccattcctataggagttgttatagatttaggaattaatgattttgtaagctcgcttgaaagattaaatgccttcgaaagcagaattacagatatcattccagatacagctccaaataaaatacctgataaaataggtaaagcattttctttaaacaaagaaaactttttatataatggtaatgctaatgcaatagttgctggagctaaaaagaaagaaattatttgccccccgctattgtaatcatcataattaatattaaattttaataaaaatgtgatcagaattattatcgctataagtaatggattaaatattgaaagcttaagtttttgttttattaaaagacctatttcataagcaataatagatattaaaaccccgaaaacaggtgaatttatcatatcattcattttgaagtcaccctccttagaaatttaacaacgtaggcagtcacaatccaaactacaaatgtggaaataacaattatagtggaaaaaggtataatcttacctttaattgcttgaaaggatgtcactaaccctacccctgctggaataaataagaatgacatatgagatattaatacctcgcatatatcttcaatcatctcaactttaacaattccaaaatataaagctaagaaaagaaaaatgagacctaaaactgtccctggtataggtaatttaaaaactacttgtactattgttcctaaaaaatatgatactagaataatcattaactgctttaaatacttcaactaaaaatcacctcttgtgtaaaaatcattggtatagtggtctgaccagttgctattactatatcatatttatttttatatctcaacttcataatattctaaaaatgtgattttattccccatatttccaattggctctcactaactacctatatctttactaatctctttaaataagaaaagcgctttaaatctaatacttttaagatttaaagcgcataatttatttccatattgtaataaaattaaaaattaattctacttttaactatatatattttttataatttatttatacttatttcttctctggcaaaaaaactccaacatgatatcagaacattctttatcatatagccatttagtacttacaaaagaatttaaccatttattatctgtaacatcaattactgaaccacaagcacccatatctttattaaatgttcctatatatactttagatattctactctgaattatcgcccccgcacacatgggacaaggttctaatgtaacatacatttcagctctatttaatctccaatctccaataaatttcgaagcttctttaatagctaaaatctcagcatgagcagtactatcatttaaggtttcttttaaattatgagctcttcctattattttatcatctaatacaattactgctcctactggaatctccccttttttcattgccatcttagcttcttcttttgcaatttttagaaaatcaaccatttgtaatgctcccatcatgaattttcttgactaaatatttttaatattatatatgttcctttctcaatattctaccatataataaaaatataaaatcataagtttcatactcattattattaacttatattcaataatcaaataaaaatccaaaaatatagaagggatatatttaaaatatctccctcctatatatgaattcatctaactcggcttaatttaattcgtttagtgtcggcattgaggctatagccccgtagttggtgcatgttattgcacctaccttatttgcaaatgaaactatctctttccatctatcaaaacttatactctctttgtcatcaatatcagatacctgtcttaatactgctccaacaaaggcatctcctgcaccagtggaatctacttgcttaatttctatagatggtattatttcattttttccattaacacttaagtatgtgcccttagaccctaaagtaactgttacaaccttaactccaatttcatgtaacttgttaacagcgctttctatatctttttcttttgttattaaatataattcttcatcacttagtttcgtaaagttactatatctcaagaatttaacacaatcctcaacaaacaactctaacttgtcttgagtgattagtgcatcgcggtaattaggatcaaatgatacatatatgttattagatttcgcatattctaatagtttaaaatatgtcttttttaactctccatctaaaaatcccgttgcagacccaaaatgaattatatctgaattacttatctttgataaatctatattatcaaacgaatattccccatcactacctcttaggaagtcaaagttacgttcaccatttgcatcaattccaactaatgcaattgttgtacttcctctttctacagtcatatcagtatttatattcaagctttttagcagctcaactaaatgcttaccaaaaaaatcattacctacttgtcctaaaaaataagcattaccttctaatttacaaatactcgccgctacatttgctggtgctccacctgcttttttctcaaatttctctccattttttaaacctttattatctacacaaaccatatcaattaaaagttccccaatgcaaaaaacattattattcatacttcacactccttaagttccacatatttagctcattaattgtaattttgctatcatttcttatttgaagttctaatccttcactcttagggtaatatgttaatgttgttacttctaatccatcttgataatatatttccatcacagaattgtcaatgaatacattcatttttagttcttttgaagaatttaatttgaattttcttatgccttttccgccaatattcatattacttctatcaactgtacatagttgtcttttattatcatatgttatcagaatatattcgtcattaaatttaaatttaacttctgtagattcaatatcctcaacttctatacttatcattatttctactgaacgagactctaaagctaaattgtagttattcaaaattagccctttaatatttattaattcattttctcttaaatttctcatttcattaatgggcttttgataaaggacattattcttatactctaaaactctaggcatagttaatgaatacatccatccatgctcatatgtcgggtattcagagtccctatctggcattccgatccatccaatcattatattttcaccattatgcttaaatatttgtggagcataaaaatcaaatcccatgtctaattctttaaatctactatgatttttcaactcaacgctctctatatctagctcaccaattacataccctgactgatataaattttgatttttcaattcttctttttctaaaccttgtggtgaaaatataaatgcatgtttgcctttacttatccttattatattgggacattcccacatgtatccaaagtccttcatatcggtttttaactcaccaagcaagttccatttaactgaatctattgattcataaattaaagctcttccttttaagtcttcactttgaacacctaatatcatgtaataagtgtcatcttctataaatacatatggatctctaaagtgagctgtatatccatttggctgtttatctataattactccatgtttctctattattccatctttacgataaatggctaagcactgatatgactctctttctccatttggaccttttacgtttcctgtgtagtataacttcaactcattatctttaaccaatccacaacctgaatagcatccatttctatcgaaccaatcttgaggttttaacgccatttggggcttagtaaagttaatgaaattggttgttgttactaatccccagtgctttgttttatgctcacatccaaatggattccattgatagaatatatgaaacttattgtcataataacttaatccatttgggtcattgatcaaaccaaatggcatctcaatgtgaaagttgtttcgccatatactcatttctttattactgtaataattatttaaattttggtttatttcctggtatgattttgggtttggcatctttcctcttctcctattaatttaattaatcccacccacactttctctttctattagcttcaaggaagtatccttattctcttctaactcttttccctctattaaatctaggattccttgagctgcttttataccaattaattcataatcaaaagctactgttgtaagtgtagggtatgaaacacttcctatatcatatcctccaaatccagctactgaaatttcttctggaactttaatattattttcatgtaaatatctaagtactcctaaacaaatattatcagttgcacaaactattgctgtgggcttatattctaatatctggctagccttactgtatgcattagtaaatgaaaaatcagtttcaacaaattgaacattacaatctggattatctttcttcacagcatcaatgaatccatttttacgatccactcctactgctatatcccattcatttactcctaaaaacactatatttttatgccccttagatttaaaataacttccaagtatttttcctgcttcataatcatctatctttatataattagtaaactcatttttttgtcctgtaaatatagttggaatactaagcctactaattaattgaatatgctttttagtaatagccatagaattaatgattattccatcaaccccttgctgataaaggctattaatgtttgctagttctttctctatatctaattcactgatcaaaataattccttgataatcattttccattaattttttattgataccagttaatactttgcctattgtaacagaatcgattctaggaattacaattccaactaatccactttttttagtctttaatctctttgcaaaaaaattagtttcaaatccggtcttttcaatcgcttcttttatcttcttagcattttcttcgctcacatatccattattcaaatatctagaaacactactctttgaaacattaaccatattagcaatatcttgaattgtgacttttcgatccatattatcctccatatatgttttatataaatattattatatatcattaatacatattattgaaaagataacttataaacttatatggatattaatatataaaatataactttatatagcttgatagatttagcaagcaaaattatccctactaaatctatctgtaattcatctaaatatttattattattcctattcttctggcttgaagaagaacaatgttaaacaaaaagcaaccgctatagccacaacgttaactaaaatgtaacttccaagattgttcacatataatagcatacctggtaatgctgtaattcccattcctgtacctgctaggtgaagtattcctgaaagcatccctccaactgctcctcctgcacatccaaatataaatggctttatgaatctcaagttaacaccaaatattgctggttcagtaatacctaaaaatgctggaattgccgatgaaatatataatgagcgcttctttttatcttttgttttgacggctactgctaaagctgccgcaccttgtgctacaataccacaagttatcattgcattaaatgcatcttttcctgtgctggatagtaattcaacttctaaagcatttaatgcatggtgaactccagtaacaactataagttgatgtactcctcctacaactagtccacctaatccaaatggaagccccatgaatcctttgattgctccaaatattaattgctcagcattatgcataattggcccaactattaataatcctagtaccattgaaaataataatgtaataaatggagttactattagatccaatacatctggaactactttcttaagtgccttttgagttttagctgcaataattcctaatactaatgctggcaatacagatccttggtatccaactacaggaatatttaatcctagtatagttagattaattggcgttgctgttcccgctgccacagcataagcatttggtaaacttggtgatacgagcattaatcctattactatacctattactggtgtacctccaaactttttcatggttgaccatgcaactaatgctggtaaaaatgcaaaagcagtatctgttaatacttgagtaaagagaacaaaattctcattcatttgaactcctagatttgtcaaaagacctcttagtcccataaacaaacctgttgcaactaatactggtattataggtacaaatacatctccaaaagttctagatattttttgaattaatgtcatttggctataagcttcctctttattatttccagttactaagtcagaattttgtccaactatgacatcataaactttatttacaaatcctgttccaagaattatttggtattgcgctgccgagaaaaattgtccttttacaccatcaatattttcaatagctttttcatttattttttccttatcattaagtataagtcttaatctagttgcacaatgttctactgattttatattttcttttccaccaatattctctagaatttcttttgctactatttgttccttcattaatgtcccctcctaattcaattaacctcgaaaaccgttttcatgttaatatgataccagttccatatataatgtgtcaatacgttttttacctaaataataaattatataaatttcctttctcccccatgtacaatgcatagtttctaatatattatccattacgcctccctattcatatgatttatattttcgaaaactataattcatcttatgtggtactgttcccactattattgctaattttaagaattaaatttatatataaaacaattagttcttagaacataaaaaaagtgtactcctttttgtagtttaaggaatacacttattaactatactgtatttttaaaatgtaattttttgaacataaattatcttgactattttttcaagttcttcatttaaggctaattgtattattttattgttgtttaattcaaaagtataaatctttagtccatttatattagtattataatacgctgccaccccgctcttaagagcatctttccgttctgtaagatatacttttctcacatcatctctactaatcttttgggcaatctttcttctacttgcattgtagaccttagttattgttatatcaccattatataactcatactcataatcaatatacataaagtaacttcccacaaaaaatattaatgctactattattagcgctattccgattattggtgatgcaaaaacaatcattaatccaactactaaaaaaacaattgaaatcttttggagtatgttactaattctcttaggcttatctgatggaataaactgttctaaaacaacttccatattctcactccccctttaaacagttatatctatagtaaatattttaaattaatttatatcatgtagtaagcataaaatcaaaatttatttcaatgaaaatttcattttatcattacttaattactattatacatactaagagcaataaattatattagttcttttactttttgtgaaatattacatagatttcatataaatttctataatccagcaactataaattcatatccttttattaataatgagatacataagaacagatgaaaattttcatctgttctttaccactgaagcaatctatctatctcattttcctgctcactatctatttttatagattctttttcgtctatggatatagctgcctcatcaattttatcatcactaacttttttaatcgttgaaggtatcatagtacctctcattttttcacctattagtacagttatatatgcagaaaaatctaaacccagagatttagcttctttagatgcaaattccttaatatggggagctaaagtaattgtagtttttaactttttacacattcttactcttacctattatgtcataagtttttacattaatcatctgtgcatcatctaatactctatagtcttttaaataatttttaagcaataaggctcccccacctatgaaaacaaatctcgaatatttcgattgctctggaaatgcctgttttatggcatttattatttctcctgctctcaaacttaatacattatcaatatccttgcttacgtctatttcctttccttctacaaatatagctttatctgcaattatttgttctgctttcatacgattagagtagttgactccatatttggttaactcttgtagaagtacatcatatgtcggattcactcccaatggatacgttctaccttctttaaattggccattgctcatatatgctatatctagtgtaccaccacctatatctactactagcgtatccttttctactaatgatttatcatataaaaataatcctgccgactgaggaaatacaattactttggtaattgtaaaacttctattttctccattaagtttcataaagactcgtctattttcaagagcttttatcagagaattcttttgttctgcaaaaaattgagcaggaagtcctgttataacccttacattgttatctattgttgaactcattgtagctgctatagctgtatataggcaaatatgaaatataatatccttatctcttgaatgttctatgctggtaaatccatcatcattaccaattaaatatgttttattgttgtactcaacagtatatttagccgtctctaactcgtgcatcttttcttttactgtcgatgaaaaggagccttctatgttatgtccaataaaatttgttgtattgtagcctatgtctgcactgattctcattttttaatcccccttttttacttttacattctatttgaatatctttttatggcgtttataccaccgttcacctaaaaattatttatccttatgaaatgtttctccattaatattcctttgtatgtagtttatatagctatcatactgctagtaccttaggccattaaacagtatttgtacaatgtattgcttgtctatactttatatacaagcaggtaaaactcaagatcaacttactattttttggattctaaattcaaattaatatctccatttatttcagataattcagattcactaatcgatttcatcatattaaatagcataaattctgtaatagtcattccttgctttctagccattctttttatagctagcttctgttctgttgtaactctgagcattatggtagcatctttcatcgtatccccccattctacgtaatgtatataatgtaattacgatttatacattacatacaatatcacacttgttttacattttttgtaaaaatatagcataaaaattataaaatctctcgacttctttcgtattttgttttttatattatataaacattatcacttttgtaagtcactccagtatatagacttgactctcttgccagtatattgatttatacaaaggattatttaacaactataatcttagagaataaaaaataatctagagcatatattcgcatattatactctagatcatttaaatcaaccttcataatttatcattttaatttattgtatctttaacaaactagttgtactctagtaggattatctcatttaccttcatatccaaatcaatatgaatatccacaattttatgattattaagttctgatattaccagcatagtaatatcgtctaagcccttttccttaataaattttctgtcaaagcttaaaagaagatcacctttttttactgcgtttccttcttcgcaatatagttcaaaaccttctccgtttagagctacagtatcaattcccacgtgaattagaaattctactccatctttggtccttattccaacagcatgcttactttccttcataactgccgctatcgttccatcacaaggtgaatatatttttccttcacttggtttaatcgcaactccttcccccatcattttttgtgagaacacttcatcattaacctcacttaggtcaacacttacaccattagcaaaagcataaaatactttattcttatttttattaaacaaattcttaaacatacatactcctactttaattccggccaatagcccttattaacttcaataagatcatctaataataatttagcaactctagcacttggtacagtcttagataaagtaagtgcctgccataatttcaaatagctattttcaatccatgcctcaacaactaatttttctactgatacttgttgctccattaatcccttttggaattgtggaatttctccttgtgctaaaggttctggcccatcacttccaacaatgcatggaacttcaaccatagctgtagaatcaaaattagaaatagcacctttattctctactatacatagcattctttcatgtgtgttataggcaattgctctagctaaatctactataaaagttgcatgagcatcaatatggaattctccgccttttgctgttcctgcctttgtgatagcacgtgctgcattaaatacatctttttctcttccatccattacttcgtttgccctagaatattctgcattagaatgttctacaacataatcaggatatagatagtattttaaataagtattaggtaaaaatcttggatctactgctaataaatcttttgcttttttatgagtttcctgccagcttggatctgtatgttgtgtttctacttcttttactgttaagtagccattttctgcaacataagctttaattctgtctgttaaatcattaccttgtttatctttaacgctagtccaccatccaaagtggtttaatccaaagtatttaacttccaaatcacttggttctaagtccacaataccagccatacgacgaagtgttccaaccggcatgtcgcaaatgtttaataccttcgaatttggttttaatctacggcaggcttcagcaacaattgatgctgggttagagtaattcaacatccaacagtctggtgaatatttttccatcaaatctattaactctaacatacctcctatacttctcattccataagcaattcctcctgctccacaagtttcttgaccaatcactccatattttaaaggaatcttttcatccttctcacgcatttcatattttccaacacgtatatgggccatacagaaatcaacatctgtaaatgcttctttaggatctgttgtataagaaaattcgatatctggtgcattttcttttaatacaatttctaaagcttcaccaatgacaccttgacgctcagcatcattatcatataattttaattttctaattggaaaacggtgtagattatctaatagcatcataactattcctggagtgaatgtacttccgcctcctgcaataacaatagaatgttttttcatatatattacctctttcctttaatttatattattcttcaaatatttctacgatttatattattattctcctacaattcctagtgcttcatccactatcgatcttattctagttacatgtaatccataaattacttgaacattttctccttttttaactactcctgtagctcctgttccctttaatgtagcttcatcaacttttgatgtgtcatcaaggattaatcttagtcttgtgaaacagttatctacttttttaatattttcctttcctcctagggcctctattattacaagtgcttcatttcctgatgttgattctttatctccagacccttggcctcctgttactttatccttataatcttgcttagtataaagtttaacttcttcattactttcttctcttccagtagtctttaagttaagcttaactattagaaatctaaatattacatagtaaactgcgaattgcactacacctactaaaataaacattggccaacctgttttttctatacctaatggtaaattataaagtaagaaatctataaatccattaggtgctatagcccttacgtttaatatatttaaagctaccattccaagaccgcttaaaactgcatgtactccaaataatattggtgctgtaaataagaatgaaaattctataggttctgtaacacctgctattattgaagttactgctgctggtataagaatcgctctagccttctttttcttatcagcatcagctgtgtggtaaagtgctaaacacgctcctactaatccaaacatctttgataatcctctagcatcccatataactgtactggataaaactttaattgaaggatctgcaatttgtgcaaaataaatgtttcttgctccttctatcgcctttccccctatagtctctattcctccaagctgactatataagaatggagtatataccaagtgatgcaatcctgttggtattaaaagtctttctagtgttccatacataaatactccaaaattaccactcttttgtatgtaatatcctaaacttgatattccccactgtactgatggccaaacataagaaagtataacagctaatacaacaactactggaattaatattaagaatactaatcttgaacccccatatatttgaaatgctccattaaattctttcttgcaatatttattatgaaaatacgctaccactatacctaaaattattcctaaaaaaactcccatatccaaaacttgagtccctagtacaatcgcctgaccagaacctcttaaattatctggatttactaacttccctgataaactcaagaaaatattcatggcattattaaatattaaatatactaatactgatgtgaaacctgattctgcttttttctctttcgcaagtcctacagctaaaccaacacagaatattattccaaggtttgatagtataggaaccaaggatcctgataatatttttccaaatccaaatatcacactattctttaagaacggtgcatattctgctaatttggtatttgtgagaatatttccaaaagctattaatatacctacaatcggaagtattaatactggaataaacatagccttagaaaatctttgcatagcattcataattttatccttcatatattccacctcttatcaattattgtgtcatccataggctcattatatatacgttttcatttaattgaaatagattgcaagcattaagaaacctgttagcttaaaagataacaggtttcttaatttgactatttattttcttttcttgtttcttgataatatctgtagattaagtattccataaacataagcatatttgcaaaaaacgagttaggcagcacattactgtcatctaatttatgcatatcaaatatcttaaatgaaatatccgaaagagctgaaatactgttttctacttcctttgtgaaggaaattactactttatttttcttcttcgccacttgaaccttatctaatacttctttagtctctccagactttgatattactattaatgtttccatgtcttctagattattttcaaaactccccttagaatctattaatatgctctttatccctaccccaagcagctttttgttaaagtattctccagtgatttcagagtagcctcttgcataaataaaaatatactttttggttccacttgctaatatttctataaacctttttacattttcctcatctgtatatttagataaaaacttaatatcagtacctattaatgcttctgactcttctataattcccgtgccaccaccatctattagtggtgttatattataaatcatatctataaatcctgtaaaacctaatttttttgaaagtctcataatagttgatgtagatgtgtagttttcggcagcaacccctctaacgccaagatccattacactatcaatattattgattatatattctaatacttgttcttctatcggtgtgatttttttattattaacaattttgcttagatcaactttcatttttaatcatcctctaattattatacgatttcaatagttgcaataacattattgtaatacattactatcttattattcaatcttagcacactattatatatgttgtcataactactttcttgttcttatattctattcaaatacttttatatggcatttgtaatataatctacttataaattgcttatccaaacgtaatacttatttcagtattcttttttatgtcattagtatggtttttatacatcaattaccttatacaaagtccaaatatccttaatcttacctagaaaaatatgtactgtattgcttgtttatacaatatacacaacatttaatttacaaaaattttattttatctacttagaatataacttcttaatctatatgtaattatagatatagaaacatactactcgaagtttatttatattcttagtatcaaaatatgaaaaacatattattaacttatatgaacgctggatattcctcactgcgaaattagtctatttatataatccaaatctaaagtattttcaataattttatattctttattagaattattaatattattaacaatactgatatattccttgccttgtataataacttcagcagatatactatttttatcgtaaatatatatatgataagaaatttttgtcctatttgatatgctaccataatgttgaattagttttattttagataaattaaataacatatcgtttatctcaatcttatctttaattgttttatcttcccctcccgatgtgcttctaatctcaatttcctctatattttccttgttataattactaaataaaaaatcatttaaagttccttttctaggatataaataatatgatgagcaaactattagcacagtaataaagaatatgcatatacttaatctttttctcatgataattctcctacataagtaaagaaatacttaaagttcttattactttaagtatttcttttacttattatcttatatttattgtaatggctttatcataattgctaatagtaggaaattttctaggatatgctgtatcagggttgttaaaagaagttcttgggattatcgttacacttctcatatcagttgtgtcaacaaaataatttaacattatacttttatcagatccatgaccatctgattccttaatcttatttcctttatcatccgtaagttcccatgatgccatatctgtagtatcactaaaactatcgatatcactgcctcctgtaaattcaattctgtatgggaatatttttatattgtgcacatatagttcatggccatctattactagagtctgattaatatccttggctaaaatcggcttgtctatttgagatgcgccaattgcaaaattgaatttccaattccctgttacatacgagtcaatattggatgtactagttacccctatcctatcataatctattaaaatatttaaattttgacttgtatctatattgtctaagtaaatatgtgtcactatatcacaagttccatcatcgttatggatgtaatcgtacttaaattcatttgtttcattattcattatctttccattaatagatatatttggtttcaactcttgtgcataatcacctctttctctactatccaaatgtgttgtaaaagtaagcatatgagtatctgcataacaatcagatagagtaaccttaattcccttatcttcaacagtttttccaatcactattttagatttttcaggtattgaataattttctttttctgaaacagaatttccgctagcatcttgaattgcagatgtattattaactactgcagcactagaatattggcaattacctgcagtaattactgaaataagtgcaattgctccaataagtaaacttttagattttttatttcgaaaacctacttttatttttttcattatcttattcctcccacataactttttatttttttgatatcactgcaagtccacttttaataataattaaaaatgatcttctgttatcattcgttttttattgacagcctcctttcttgttgtaaataatattaaattatacgcctaatttctatttcatacaaataattacatatattgaaatagcttgttggtagatttgagagaaaaacactatctcttatctcttgattcctcatctcttttacatttataaatccaaattctttgatataggatgctagcatttaatatcaagtattagcgtatatatgcactaaactcctaaaatatttatctatatttttttgactttccttttaagaatcagtatgaaaacttttgttcatttttttgtttaatttcttattattttttgcttatcaaaataaaatagtacaactacagtacaattttaagctctatttctttttcgcctaacatgatttttatttcctctacttaatttaatatttactttgagtatttttattttagttcctctagttgttcctttttatataatttcatcatcgttagtacctcttcaaaatagaaaaaggaatactcaaagttcctattactctaagtattccttttataccaaattgtaatatatatttgattatattttttaattcactaatatatactaacttacactccaagaaatttttcttctgtcgaaagccttaatacaacttcttcctctttctattccaagtttctcaattccatcattcagaattagaaatatgtactggccctcaaagttacgtgtctccttaacgatattacttaactccattaaatcaatattttctaatttatcatgaattttaaaaattggcatatgatataccttatttataattaacttaacatgaactaaataaaaacaaatgatcattgctttctttattccagttccaggctttccattaattccaattatcttaacaggaatttcatcatcattatattttaaatacagtggcaaatggctatcctactactacataagttaattctttaaaataatcatctaaattttctttaatatcttccgtatccttaaattaaaatatctcgctatatgctttctaacaagcacggttccacctgtataaatgtaagtttcataagctccaccttctgattaacttaaaaatatcctagaaatcacttggtctaggtgcagaaggtccaagaccaatagaacaaagccaattcagtactacctcatgcagcacatttatgttgtctacctggcagtgttctaatccgccaagtcttctatcctctatggcgaagaacgtcttgtttttcgaaccagcctgctcgtaatttttaagagcttgtgttagcggattgggctgaaccaatatctcttccgcaccgtgcatcacaagaagtgggcattctatctggtgaagcacgccctcaagattgtaggcaaaacgaggatttccagcaaagtcatccaagctttttgcacccaaaattctcatgccgtgagcagctaaacttggtggcatccattttagcattgcctcccagtcgaacgcgtgggttcctccgtcagagatgacggcagcaatcctgttgtcgaatgcagcaaatctaagggagtcatatgccgcaaaactctcaccatgaacaataatcttgttaggatccacttccggtctagttagaagaaagtcaattgctcttgaatgaaaagcctcgctgtcagctcttctgccctttcctttttcgtacattgaaagaccagttccaggctgatcatagaccataaagttatatccacacgaaataaatgcaggtcctaaccagaaatagttctcaattgaccactcatcaccaccattgagggccaaaattgtgggcttcggaccttttatccaaggaggtgagaaaaagtacccatccaacttgacatcctcataatctacttggattttctctggttttacatcaaagtactttccagcagcttcaaagagttcatttactttcctaaatatacggagtttctcggcatcattatccatcacagcatattcagcgattcggtggtaattgcaagcacgaatgtaacagttacgtgctgtataccagtttccaaccgcttctgcctccttaccatgcctttccaaagcttctgctgttatgagccattccctatgccatgtttccttatcatttggatctatttttttgcatgcttcataaatttcggtgacgtcagcagcaccaagacttgccaaacctagagctttagttacttgatatgacatcatatagttgtttggccaacggctaaattcaattgacattgcagtatcctccttctctagttatatttattacttccatccttctctgattaagcataagagtacatgtttcgaaatagcggcacctatctatgtccgtgccacgaacttgattctctaccatatcatttcctcctatcaatttacttgtagtttttaagctacaagtaaattttacgatataaaaataaagctgccctaaaaggaaaataaatctttataaagagaatgtaaaaaattataaagtattaggaagcaaaaaagccactgccggtgttctctacgttcaaccaacagtgacctttaatttattttagagaaataaaattagtgttgtacaagtggaagactgaactttatacccaggccaccatattcagaagaatatgcatagatttctccaccatgatattcaataattgatttacagcttgctagtccaagtcctatcccaccattttcaatttgcctggatttatccacagtgaaaaatttaagaaatagtgaagatatatccttatccggtactccaatcccattatcctcaatttcaaaataggcataagccccttgtgagtatccagtcatatacacttttaactcattttttcctccatatcttacaacattactgaatagattaccaaagactcgacctatcataatctcattgaccataagcatcatattttccttaaataaatgtttgtaaataagctcatagtcaaatcctgatagctcatgttcatattctagggcaatgttctcaaataattttgatgcattaacgggtttcacggtcatggattctaaattcagtttctctttgatgaaacttacaaagtcgttgataagttcagccatatattttgactttttttgaatcaactcataatattcctgcttttcattttctggtagacccttttgcatggctaacagttcagcaaaaccattaatagatgttaatggtgcttttagatcatgagcaatggcagcaatcatatccatttgctctttatgtgctagttggagcctcttttccatattattaaaatgattataaaggtctccaatttcatcattactccttagcgcaagtggcggcaatggatgcacaatatttattctttctagtctggaattaagtagtcttattggttcttctatacaaaaatggatatacataattaaaataataaagatgaaacaggcaatagcaaatatgggaaggagtaatactatatatgatggatccagtaatgaactagatataggtgaatattctgcaaagataaacttcaaatagattccaattgaagccataaaaactataaacataaccagaaatagtaaaggaagctttattttcagtttcatattatcactctctttccttgtacttatatccaattccccaaattgttttaataaaatcatattcaggaccaagtttcttacggatattttttatatgaaccgttacagtatttaattctccgtattcgtctccccagacatattcatatatccgctcacgagtcaagacattattggggttatgcatgagcatggacaatatttgaaattcctttgttgataagttaagctttttgttatttagaaatgcttcaaaagtcttatcattcaaaatgagaggagaatcaatcttttctctatttggactaagttcattccactctttaaacagcctgtcgactttcctgaagttggcccttatcctggaattaagctcctgaatactaaagggctttgtcatataatcatctgcccctatttcgagcccaacgattttatcaatatccttatcccgggcgcttaaaaacagaattggagcattataagattttctgatgcttctgcagacatcaaggccatccatatcaggcatcattatatcaagaatgatgaaatcaatattattttctttcaatacacataaggcttctttcccagaatatgccgaaatagttccaaatccttcatagcttaaactctttgttataagttttactatatctttatcgtcatctataactaatatctttttttgcacttttgcacctccgatctgcttcaataaacgttctcttctacaggccttccacacaatactatctcatttatgattatcaaggatgataaatttaatgccttttcagaagtagtatttaacgaaagtgaaatcttattatgattatctgctcttgttataattgttccaattcatttgcgaatgtcatttttctcatttgaatcagcataattccaccataatatattgacataaacaccaataaatacaatgactgatacagttaatgagccgaggatcacttatatatatttcagggattttcaaataaagtaccatagtaccctatacaaaaaaagtatagcactcttttttttaatattcaattagatacttattttatttcatggtgccaaaaaagtaataaattcttaagtaaaaaatatatagaatcatagaaatatgttataacaaactaattcttaaaataattcatcattattcccccatatctgtatatatttttattaatcatattacacttaagtacttttatatggcgtttatatagatatccaatcataatttatttgatatgtcttaaatttatagtgtaatattcttttttatgctgttcatatgacatttgtactactattaccatataatctttaatagaacaagaatattaaaaaataattgtattgcttgtatatgcaatatatacaaaacttcacataaaataaagcacctatatctatatagatgcttttacaactcacgatttctggattcgattaactcattttctattcagtatacattattctgtaaatattagtatttaagcaattttatcagttccatttttcattgtgacttattattttctataattggtgcaatctactgcaccatcattgcaccattgacttaatatttatcttatcataaatatactaaaaacctgcagcttattcattcaattaactgcaggtttttttatggtactcccagcgggaatcgaacccacatctatcccttaggaggggattgttctatccatttaactataggagcataatatttaaatattcttttttgtttaatttgtacttataaattttattacaattatttgtcattgtcaaattaataatttatttttacataaaaaaataaattatattagatattaaaggtctgattaatatcttttaaaaaaacaaattttttcataaatactttataaaacacaaatattataacttattcttcttctagctccatatgaacttctaaactaataagcaaaaaatctgaatgtactaggccaaaactgtaaaaataaagcttaaataccctctatatgtatttaagccttataattttaaattgttttaactttaaatttcttattaactctaactctaaatatatctacaattttggttatcagaggactggatgctattattactgctagcgatatgagccaatgacttaattgtattttagttaagctaaatatatatcttcctattggtgttaagaaccctaacactattatcccaaacatagataaacacattatcgttttaaacttagttaacggtcttgcgactctaagcaataccaccatactaattccagaaaacattagtactgctaaagttctactgtaatccattgggagattcatttgtattgatataataaatgttataagtataaatatagcaagtaatatcccgttaggaatactaacagttaatattcttgttaaaaatccctttttaactccacccgtactaggcaataacgctaaaaagaatgatggaattcctatagcgcaacttcccactaatgacaactgtattggaagtattggatactctataaataatatagaacatacaaatgataaaattatgcaaaatacagttttggataaaaataattctgataccctctccaaattattaatttgctttcttccctcttcaagaactttaggaagcgcagtgaaatcagatttcattaatactaattgggctacagcctttgttgcatcagagccatttgccattgcaatgccgcaatcagatgattttaaagcaagtacatcatttactccgtcacctgtcattgcaacagtatgccccatctcctgaagagctaaaacaattcttttcttttgatgcggagtaactcttccaaaaacagtcatctcctgaatcaaattcttcaatttttcattatcctctggcaactctcttgcatccacatatttctcccagccacttacgcctgctcttcttgcgacctctgaaacagtaataggactatctccagaaataatcttcacccctacgccttgactatcaaagtactttaatacatcaggtgctgcttctcttatgatatcctcaattagcaatagtgctacactttctatcttaccttctaatttttcattcaaattattatgaagatttgctagtaataaaactctttttccttttctagcttcttctttaactatttcttctattaactgatatttcttacccaatattatttccggtgcgccaagtacccatgtcccaagcttttcaaaagtagctccactccattttcttttagatgagaaagcaattttgtctaaaactttgatttccttatcatattccttatatttttctaatatagctttctgagttggattattacttggtaaattatttattaatgctgctaatacattatctatatcttcagaacttttagaaccaatattcttcacttctgacaatcttaactctccttgagtcaaagttcctgtcttatctaaacaaagtacatcaactcttgctaagacctctgtagcactcaactcttgaactaaagtatcatatttagataactttataattgacactataaatgtggcactcgttagtaatactaatccctctggtatcattcctacaattcctgatactgctcctattaatgcatcctgccacgtattccctggtattcttagttgagttactattaataatgcagatagaggaggtacaatccatattattactctaaaaattttatctattgctgcttgtagctctgaatttattattttaaattgcttagcttcctcagcaagagtagacgaatatgtttctttacctacttttgtaacaatcgcatatccctctccagatactacgaaacttccagatagcaatgtctctttgtaattcttagatattgcatcagcttctcctgttaacatagactcatctatttctaatccgttactatgcaaaacttctccatcagccaatacctgcatgccggtttccagataaatcacatcatccaatacaatttcttctattgcaatctcctttatttcaccatttctaagaacttttgcatgcgcagaacttatgactgataacttttctaatgtgcgcttagctttaatttcttgaaccactccaattaatgtatttactattataacgcccacaaatatagcattcttaggtgatcctgctagaataattattgctgcaagtacaaagtttattgcattaaaccttgtaaacaaattagctcttattatttgaggcatagttcttgatggtgttttcggaatgtgatttacttttccttctttaattctctgcttaacttcttcagatgttaagccaattatagtttcagcatctttctccttcatattcaaagtattattatttaaattcatcaaatttctcctgcctatgtaaattatttgctatactatttcatagaattatcattgtcttatatattatacattttttaatattattttaccctaattatttacttaattttaaattaattttattgaatttttaataggtatgtaatctatttagtctttcaatctattaatttttatactatactgattagtgtaaaaattaatagattaagggtgtgtaatttttaatgttaagaactatctatttttatctcggattaataataagtcttatattttcatctatttatagaattagaataaaaatcttaaccaataaaggcgatattgaaggaagaaaatatttcattcataaagtaagccattcttggggaaaatttataatgaaaatatcaggtgcaaaaattaatgttatcggcttagataatcttccaaaagatcaaactgtattatttgtatctaatcaccaaagtaactttgatattccattgcttctaagctgcatagacattccaaaaggatttattgcaaaaaaggagcttgaaaaactacctcttattagtacttggatgaaatatataaattgcatttttatggatagagataacttaagaaaatccgctgaatcaatagttgaaggcgttaatttattaaagtctggttattcaatggtaatattcccagagggcactagaagcaaaggtaagtctgtagatgagtttaaaagtggaagctttaagttggctacaaaatctaaatgtcctatagttccactaaccataaatgggacatataagcttatggaagaaaataacaatgcaataaaaagttctgatatagaattagtgatacatcctctaatagatgttgctgctctaaacaaagacgagctagaaaaactccctgaaactgttcattctatcatatctagtgcttgcaagctacactaatataaaaagcgagttgccttaaattaggcagcttatttttatgcatcaatttaagtatattttatactaaatgctgctaataatatatttagattataatatcttttgacatgaatttatctattgtgttataatgaattcatttgacttatatataaaactttaatataagttatcgaaacaaaaataactaattttgaaacaaagaaacgaggatatttaatgaatgataatcaatttgctacattaggtcttaaagagagtattgttaaggcaatatcagaccttggttttacaaaaccatctcaaatacaagaacaaagtatccctgtaacacttagtggcgctgatttaatagggcaggcacaaactggtaccggaaaaactgcagcttacagcttaccaattatcaccaagatgagtgataatagaggaatcaaatctcttattttagcaccaacaagagaacttgctgttcaagttaatgaggagatacaaagactttctaaatatgagaaaattgtaactctagctgtttatggtggagattcaatcgacagacaaatcagagcactaagaaaaggtgatgtcgatattgtagttggaacacctggtagaatattagatcttgtaaaaagaaaatgccttcatttagaaagtatagaatttctagtactagatgaagctgacgaaatgcttaacatgggattcatcgatgatattcaagaaattcttagtcatacaccatctgaaagacaaactttattattttcagcaacaatgcctgatccaatagcaaagttggctaaaaagtatatgaaaccagatgctaaacttgttagtattaagaggagttcattaactgtatctaaaattgagcaaagttattttatgattaataataagcatagattagaagctctttgtaggttacttgatctagataatcctagttcggctataatattctgtagaactaaaagaggcgttgatgagcttgtacaagagctacaatcaaaaggttatatggttgaaggtatgcatggagatatgacacaagctcacagattaactactttaaataaatttaaagaaggtacactaaatctattaatagctactgatgttgctgctagaggtatagatgtagaaggtgtgactcatgtatttaactatgatttacctcaagatgtagaatcatatgttcacagaattggtagaactggtagagcaaataaaagcggtacagcttattctttagtaactccaaaggatttttcaatgcttaaacaaattcaaaatgttactaaaagttcaatcacacaaaagccagttccaactgcagaagaaattaataataaaaaatttaaggacatgatgtcagaggttgagagtactattaaagctggtgatcttactaagtttataccaagtgcaatagaattgactgaatcttatgatgcagtatcaattatttcagctctaatgaaaatgaagtttgaaaatgaaattgtatttgattacagttcaaacaaattagaagctcctaaaaaagaagatgttcgtttatttttctctgtcggcaaaagagacggtttgactccaaaagtattaattaattatattaaagatatgacaaaagttaatgcttcagcaattggtcaaatagaccttatggaaaacttctcatttgtaactgttgatgagtctatatcttctaaaatattaaaaaattgtcctggtggaaaaattaataagaagaaggttaatgttgaagttgctaataagcgtaagagataataaaactttttattcttaatactcttacttaagggaagatttaaatttaggtataatgcctagagcttatcctcccttttttgcttttattataaaaataactactctaaaaataacattaaaacatttcatgctattccttatacattactgtatatccgcatcatcttgataagaatccacatctattatattcgatgtattttctaacgaatactttttctgcattattatactaagaactccattatcaatacttttaagtatctgatttgtgtctatatcctcaatatcattaaattttttattataagccttcttaacaagagcagtattagaaaatatcccaaatccactttttttaatttctaatctatttaggtttatatctaatattcctggatcatatcttatgcttaactctctaagatcaataccttttagatctatagttagatgatacatatcatcataccgattaagttttataaaattattatattcttctctatttccttcatcagaagaaatatcctcattatttttagcaaattcatttatatcaaagttatctaaaaatgaattcataattccacttatcttttctatattgtttggattaaaaacattatcaaatccaaaagtaaaaattttaaacatatcttcctcccaatatatttcttaacacttatataatatttataaacttccaatttgtttaaatcatttatcttaattttagttgtatttttaaactttaattagtgtatcaattctaaatattacttaattttttcaagtgtataatatcattactttttaatactctattaatccaaagcgtttcttttttcaatatatatcaatacactattgaataatctcatataagatattacaatatttattatatataggaggatactataatgaagcgtattgataagatttataactatattttaaaaaattctaagaactttaataaagataaatttttagatcaaaaggggtttagtgcccaagaaattggcgaaaaattagatatattaaggaataatgtttcaaaagagcttaatattctctgtagagaaaagaaaattattaaaataaaaaataggccagttatgtattttgatagaagttgccttgaaaatatactatctataaagctacctgaagatttagaggaaatattagatgttaatatattactttcttctccttcaaatgcatttactgagaataagtcaccttttaactatctaattggtgctaatacaagtttaaaaaatcaaattgaacaagccaaagcagcactgatgtacccaccaaacggattgcatacattaataattggtggtacaggcgttggcaaaagtttatttgctaacataatgtatgaatactctaaatatataaaaaggctctcaaaagatgctcctttcgttgtttttaattgtgctgattatgctaataatccacaacttcttctatcgtatatttttggacacatcaaaggttcctttataggtgccgataaagagacagatggtattgtttcaagagccgatggaggcattttactccttgatgaaatacatagattaccacatgaagctcaagaaatggtatttcacttcatggatacaggaacttacaataaacttggcgaaacaggtagcacccgaagagctagtatactattaataggttccacaacggaagatcctaattccacattacttaatactttcataagaaaaattccaataactataactattccaagttttgatgaaagaccaattgatgatcaaattgagttgatacactatttattatcaaatgaagctcaaagagttaacaaaactattaagatttcagctgaatctattaaagctttaataagaagtacatcttacggaaatgttggacagcttaaattgaatattcaattagcgtgtggaaaaggatttttaaactgtattaatacagatgaatgtattgatataaatttaaacttattcccatctaatataaaaaacaaaattttaacttttagcgctaaaggaaaagttaatgtaacagaatgtgatacaatccctaacacaattacaattcaacccgatggtgataaaactttcttagaaactgatgattataaaccaccttttaatatttataacattgttgaggacaaaacttctgctcttcatgaagaaggcatgagcgatgattatataaaagattttataactactgacatcaatattcatttaaagcaattctatgctaagcttaaaaacgatacaaatcgtcgtgaagtcttattaaaaattgtcaataaagatattgttgaatttgttgaagagatcaaagctctggcagaatccagattaaatagaaaattaaatgaacgatttatttatgcagtaagcctacattttagcgctctgtttaatagaattaagaaaagaaaggtttccttttcatcaaatattgagctacagttatctgttaacaataaagaatatgatgttgcaactgaaatccatcagttgacccaaaaacgttataatatgactattcctccaattgaggttgattatctagcattgcttttagcttcaatacaagaatcctctcaccaagaaagggttgggatagtagttgcttctcatggttcgagtgcagcaacaagtatggttgctgttgctagaaagctctttgatgttgataatattttagctgtagatatacctcttgaaatgacgccttctaatatattacaaactgttattgaaaaagttaaaatagtcgatgaaggtaaaggagtattacttttagtagatatgggatcattaaataatttgagtgatgttataaatgaacatactaacattaatactaaaagtttagatatggtatcaacgcaattagttctagaggctgttagagcatgttccctctataatacaaatctaaacgccgtttattcttatctaattaatggttttagaggctatgcaaataacattattactgaatactaaacttcatccaattctgaatttagtatcaaaataatcttgtaaatattagataatatattatttccaaaataaagtgtattaaagcattaacacacagtattgactttgtataattttactctattaaatacaacagaactgtattcttaatagtattgaatattctctgacacactaatgaggctgttaatgctatatattagtatccaaatagtaattaaaaggtggtaaagtagtgatttcactaattgtaggcatttataaaaatttttcaaaaaagcctatcaaatcagcaaaaattattttcggtactcaaaaatgtagacatagttatattaaaatcacgtgaggatataggtaatctagttggaacatatattaacacaattttcaccttcaggtgttcaatctcacatatttgattaaatttgttaaaaaaatgtagttaatctacattttttttaacaaatttaatcacttacattcagatgattatttattttttcttttgaaatcagttattttttctttaaactttcttacttcctcttttgttttatttatttctatatgatctaaattacctctacctaacctatctgagagggaaactaagaaaatctcatttatatctacatctcttagcatgtctcctatattttgaaatttcatatctttagttacaaataaactttgcatatgccatcttacaagccctcttacttcatctataaagttttcttccatattaaaatatgtaagaaattctctagccatttcagctcctacactgtcgtggttataagatgttagtcttccttttcttaatttagtagtaggttttttacctatatcatgcaatagaagcgcccacataaatactcttttatctctgcttctttctctatttactgctccttgatcaataaccatcattgtatgtacaaagacgttcccttccggatgaaatttaggattctgatcaacatctcgtaagtcacttatcattgaaaatggataattatcaagattatgattttttagtgcattctctaagtaaatagatggcttatcttcgctaattaaacgctcctcaatatctaaaaaaatttctttttcattcataatatactcctattagacattttctactgaaccaataaactttattttaattcaacaatattagtatatctaatatcaaaattattaaactcaaaagtttttaaaaagtcactttcaatattaatacattatttatatatagaaaatagtaggtaaatctatatcaaaacagatcaacctactattttctatatattttattcttattgcttactgcaagttagattctatattaattggtgaatactttatttctataaagctgaatttcctctctcacctgttctaattcttatagcatctgcaatatcaattataaatatttttccgtctccaacttcaccagtcctagcaattgaagtaataagttcaattacatcttctaccttatcatcttctacaactattttaacttctatctttggtaatacatttgttgttatttcagtacccctatgatattccttccagccacgttgttgtccacatcccataacttgacttatagtaacaccatttatatttttattctttaatgcttctttaacttcttcaagcttcgaaggtcttacaatagcttctactcttttcataatatacttcctccctaatcatctatataatgtataatattattttaacaatatatatctaaaaattatacaactaatttttatacaaatactttatcacaatatatacattacacaatactataaagtttcatggatatattaatatttagtctaatccagtaaacgctgggtatgctgtttcaccatgctcagcgacatcaagaccatcagcttcttctgcactttcaactctaatagtcataaataatttcataactttcaagataataaatgtcataaccgctgcaaaaactattgttattgctataccttctatttgagctattaaaagcttaatatctccaaagaaaagaccattccattgtgctacagagtttattgctgtttgtccaaatagacctgttgcaatacctccccaaactcctccaattccatgacatccaaaggcatctaatgcatcatcatatccgaatttagatttaactgcagtcatgaagaagaagcatattggagatactatagcgcctattataattgaactccaaaggggaacgaatccagccgccggtgttattgcaactaatcctacaacagctcctgttgcagctccgagtattgttggctttccatgttttattttctcaattagcatccatgaaagtaatgctgacgctgccgcagtatttgttgtcatgaaagcatgaactgcaagtggaccagcatttaatgcactacctgcattgaatccaaaccaaccaaaccaaagtaatgcggctccaagaactacaaatggaatattgtgtggcttatatgacatcataccatatccacgtcttttacctaatacaatacaagctacaagtcctgaaactcctgaacttatatgaactacatctccaccagcaaaatcaactgctcctaaagagtttattaatccacctgaaccccacaccatatgtgctagtgggtagtatactaaaattgaccacaatgctatgaatataaatagtgctgagaatctcattcttcctactaaagatcctgttataagagccggagtgattattgcaaacatcatttgaaatgctgcaaaaagctcatgtggtatagtaggtgcatacgatgaaggatctccacctactccattaaatccaaaaaagttaagtcctcctattactcctccaatattatccccaaatgctagtgagtagcctattaaaacccacattacagatgctaatccacaaataaagaatgaagacattaacgtatttaaaacattttttctacgaaccattccaccataaaagaatgcaagtcctggtgtcattaaaagtacaagtgctgaacaaatcaatataaaactgctatcgccaaaattaatttccataaaaaatcccccttaaatatagtaagtttaagatataaattgctaattaacatcttgaaattacttaaattttttcaaataactgttaatagagagataactgcgcacattatctaaaaatcaatttaatagtctcttagaattataattataatttttataaatgaaaaaaggtgcttgagaaatatactttcgagtatatttctcaaacaccattgttcttattgatagtatattatctccatataaaattgtcaacatttttttcaagggagatttaattttgtttaacatctaatcaaaaacacttaatgtattaattattattttttttatgctttcatgcttaattggcatttcctcattcgttcctattaattgaatcaaatttacgagatctcttaacttacttatgttataccaattttgagtaagcttataatctgaaaatttattatactcatattcaaatgcctcaattaattttctattaaaatattcttcatatctaaagaactgtcctatatctgctaaagggtgccctgctattacgaactcccaatctaatatacctgctagcattttattttttattattatattagtcccctgaaaatcgccatgaacaagcctaggatccttatctaaatctcttaatgctttttcattcttcctaactacgcgattaatgtcatttacaatagtttttcctaaacgcttcttagctatatctcccatgaagctttcataccatgaaacaagtggtggtagttcttctcttatatgtaaacattcatctaaagccccaaccttagaaaacttatagctatgtattttagctaaagcccttgcaacgtttctaacaaaactatcctccaaactataaccttctcttatagcctgccctatagtctttccctcaatatattcataaatggcatattctctgtttccaatatcctcatcttcacttactctatatacttctggtacaggtacgaacttagagtttcttaaaaaatttaataatttaatttctttcttataatcctgcccctttataaaaaatatttttaatatatattttttttctagattattagattcaacaatataatttgtagtcctgcacccagaatctattggtataatattattaatgtcacattctttcaatatacctttaaataactttttaatcgttgcactactaacttccaaaaatggaaatgtcctttcccatctatattccatgccttacctctttatttattcaacttattgcttataatcaaaattaaatgaaaatattcttaaaaaaatttttttatgagtcccattacttttaagtaaaatattaaaatttacgacaatatctaaacaatatattttactatttccttgggaataatccactaggatgcttctaattcctttacataatcataagctttctctatagcttctgtttttgtttcgtatatatgacttactccaattttaactacaaaccccatcttatttagtactttcataggttgattttgtacatgtgttaagcaaagttttatattcaactcattacaatgtttaagtaatctagttaatgcatctattgcagatgcatctattgcgtgagtatgtctcatgtctaaaattacaacccccactgaagattcaatttccttcattttatcaaaaaactcatttactactccaaagaacatcggaccatttacttgatatactcgtatccttccatctgctttttctagtacagtattagtatccttatcgaaaaccttctcctctaccaaatctctaatttcagtagtatcagatactctcttcataaataaaaacatagtcatgatcattccaattcctattgctacaaccaaatcaaatataaccgtacatgtaaatgtaagtaataatacaataacatcacttttaggtgcctttaataatgatttaaacactttccattgactcatattataagcaactattatcaaaattgctgaaagtacggacatcggtatcatccttgcaagtggcatcaaaattaacatagtagctaacaatgttatagaatgtaccatccctgatattggacttcttccatttgattttacattagcagcagtccttgcaatcgcacctgtagcaggtattccaccaaatattccacatgtaatattagctaaaccttgagctatgagttccatatttgaatcatgcttatctgatatcattccatccgccacggttgctgataatagtgattctaatgctgccagtatagcaatagtaatagatggagcaaataatttatttattacatccatatttatcttaggaaacataggcactggtaatgttgatgatatctcctgaaacctacttcctatagtctctactggtatattaaatattttcacaaaaatagtagcgacaattagcgcaatcattgatccaggtattgtcttactaactttaggccaaaatatcattataaaaatacagcttatacctattattagcgaccatgtatttaacgttcctatattggtaagataacttttccattttgcaaaaaactctgctggaacattttcaattttcaatgctaaaaaatctttgacttcagtggataccagcgttactgctataccagcagtaaatcctattgttattgtctgtggtatgtacttaattaatgaaccaaactttaaaatccccattattactaatataattccagccattatcgttgctacaacaagtccacctataccatactcttgaataatagaataaattataacgacaaatgccgctgtaggtccacctatttgaactttacttccacctaagagcgaaataataaatcctgcaaatattgctgtcgtaagccctttctctggagatactcccgatgatattccaagtgctattgacaacggtaatgctattacagctacaataacgccagctataatatccttcataacttgctctctagtaatttccttgttcttaatcatagaaaagaacttaggcatcatttctaatcacttccttattaaatttgtcagtctctatcttactcctaaatgctagagtagtcaaaataatcccttgttattactacattactagaataatttatagagaaattaataaaaagtgatttttattaaagttaacttattcaatttttttaacaattatctataacataattatgctttttctcttaaatacctaatatcttatctatcttactttctagtccttttgtaatgttcatcaatggcaatctaacctcatcagaatctattagccctagtttctttaggctatatttaagaggtgttgggttgggttctgaaaataatagcggtatcattttatatagagaattccatttttttagtgcaacttgatgatcattagccttagctaagttatatacctcaataaaatctttagtatttagatgtgctgatgccattattccgccttgtcctccaagcataagcgtcgtataaaaatacatatcttcacctgttaagatggaaaaatcttttggaggattcattaatagttcagttgtttgcttcatgcttccacagcagtcttttattcctattatgttttttaactgagataatacatgcacagtttcattttcaatattagctccagttctatatggtatattataaagtactatatccaaatcagttgattctgatatacttttaaaatgctcataaatacctctttgatctggtctcgaataatatggtgtaactgatagtattccattcactttatgcttttctactaattttagctttttaattacttcacttgtattattgccgcctaatcctatgtatactggaactctattcttattatattcaacagttttttctaaaatttcttcatattcattctctagtattgtaggtgattctcctgtagttgcaagtggtataattccatttactccttcttccacgtaatgattaatcattctttcgtaagatttaaaatctacctttccatctttaaatggtgttaataatggtactagaactccttcaacctttgccaacttttccaactcctcaaatctattttattaaataagaaaacccgttagcatatataccaacgggtagagttaaccgcataaaacttgtacaaaactaaaacataataatatcataactataacattattatctatagcttcaccaaatccttgtagctctccactttcgtgacagttatgcatatattttatgcatacccagaaataaatttttgcataatctaaatcttcggctataatacctttctttattagtcaacgtttgccaactcataataaatactctttattaatagcacctctaccttaggttttcgttattacattattaaaattatatcatttaattaactacttgtaaataaaatagcatctatcactttgccaaataacataattattactaatattattatcggctttataatcttcgctccacttttaattgcaaaatgtgcccctaaataatttcctaaactagcacatatagctgcaggtatacctatcataaataaaaccttgccatttaatatataagctattagtgctgcaaaattagatgccaaattcactatcttagcattaccagacgcagttataagattgaatcctaaaaatgatgtaaaggctaaaactaaaaatgttcctgttcccggaccaaaaaatccatcataagctcctattactaaacctattattcctgccactaaataaatctttctatgttctactttcttttcgttattttctactccaatttttctattaaacaaaagaaaaattgcaacaataggtaagatgataataagacagtattgcaaatacttttcatctagtagcaatactaattgcgttccaaaccaagatcctataatagcacctatggctgaaattaatgctggtttaatttttatattaccactacttaaaaattttatggaagccgcaaatgttccaatgccatttgcaaacttattggttccatatgccatatgtattggcattccagcaaaaatatatgctggcaaagatattattcctcctccacctgcaacagcatccacgaaacctgcgcaaaatactaatgggcatatgataagcaatgtcatattatatgaatacataacctctcctaatgacaataagctaattatattctctataaagataattaacttattacgactttaataaaaataaaataaaaaagatagtcattacaactatcttttgcttacctcgcaacgtcctactctgccacacagtctcccatgcagtaccatcggcgctatagaccttaactttcctgttcggaatgggaaggagtgttacctctatgccatcatcacgagatcttcaatttgaaaaaactttgttctttcaaaattgcacacagtttctttaatgtatttacaacttgactatattggtcaagccctcgacctattagtatcagtcagctaaatatgttaccatacttacacctctgacctatcaaccttgtagtcttcaaggggtcttactagcttatgctatgggaaatctcatcttgaggtgggcttcacacttagatgctttcagcgtttatcccttcccgacttagctacccagctatgcttctggcgaaacaactggtacaccataggtcagtccatcccggtcctctcgtactaaggacagctcctctcaaatttcctacgcccgcgacggatagggaccgaactgtctcacgacgttctgaacccagctcgcgtgccgctttaatgggcgaacagcccaacccttgggacctacttcagccccaggatgcgacgagccgacatcgaggtgccaaacctccccgtcgatgtgaactcttgggggagatcagcctgttatccccgaggtagcttttatccgttgagcgatggccctcccacgaggtaccaccggatcactaagcccgactttcgtccctgctccacttgtaggtgtcgcagtcaggctcccttctgcctttacactcttcgaacgatttccgaccgttctgagggaacctttgggcgcctccgttacattttaggaggcgaccgccccagtcaaactgcccacctaacaatgtcctgtcaccagtttcatggcatccagttagaacttcaatactatcagggtggtatcccaacaacgactccaccaaggctgacgccctagtttcccagtctcccacctatcctgtacagacaataccgaaattcaatgctaagctacagtaaagctctacggggtctttccgtccaatcgcgggtagcgagcatcttcactcgcactacaacttcgccggatttgcagttgagacagtgcacaagtcattacgccattcgtgcgggtcagaacttacctgacaaggaatttcgctaccttaggaccgttatagttacggccgccgtttactggggcttaagttcacaccttcgcgttaccactaagtgttccccttaaccttccagcaccgggcaggcgtcagcccctatacatcagctttcgctttagcagagacctgtgtttttgttaaacagttgcttgtgcctattctctgcggcctgatttctcaggcaccccttctcccgaagttacggggtcaatttgcctagttccttaactgcaattcttccgtcggccttaggattctctcctcatctacctgtgtcggtttgcggtacgggcactacttctctttctagatgcttttcttggaagcatggaatcagatacttcggttccgtggaaccttccccatcacgcctcagaattgttggaacggatttgccaatcccaactccctaaacgcttagactagcatccaatagctagcacatcctatccttctccgtcacaccatcgataatgacgattatagtggtattggaatatcaaccaattgtccatcgactacgcctttcggcctcgccttaggtcccgactaaccctgagaagacaaactttactcaggaaaccttagatattcggcctgtaggattctcgcctacatctcgctactaatgccaacattctcactcgtaatcagtccaccgctccttacggtacgacttcagcccgattacgacgctcctctaccgctcacgcaaaatagcgtgaacccgtagcttcggtggtaagtttgagccccggacattttcggcgcaggatctcttgactagtgagctattacgcactcttttaatgagtggctgcttctaagccaacatcctagttgtcttagaaatcccacatccttttccacttaacttacactttgggaccttagctgacgatctgggctgtttcccttttgaccatggaacttatctttcatagtctgactgccggactgatagtatgtggcattcggagtttgataaggttcggtaagcgctatgccccctagcctattcagtgctctacctccactactcacattttccgacgctagccctaaagctatttcgaggagaaccagctatatccgagttcgattggaatttctccgctatccacagctcatcccatgctttttcaacagcaacgtggttcggtcctccacgaggttttaccctcgcttcaacctggccatggataggtcacccggtttcgggtctacagcatgcaactagtcgccctattaagactcggtttcccttcggctccgtaccttaagtacttaacctcgctacataccgtaactcgttggctcgttctacaaaaagcacatcatcacacacataaggtgctctgatcggttgtaggcacatggtttcaggttctatttcactcccctcccggggttcttttcacctttccctcacggtactgcttcactatcggtcatcaggtagtatttagccttgggaggtggtcctccctgcttcccacaaggtttcacgtgtctcgtggtactctggtgcagaactgattatcatagttttcacttacgggactattacccactgtggtccaactttccagttgtgttcaattaactatgatttctcgttatgttctgtccgcaaccccagagataaatctctggtttgggctctttccttttcgctcgccgctactaagaaaatcgatttttctttctcttcctccaggtacttagatgtttcagttccctgggtataccttcataaagctatgtattcactttatgatacatggggtttcccatgtgagtttcctcattcggaaatcttcggatctctgactatgtgcgtctacccgaagcttatcgcagcttatcgcgtccttcatcggctcctgatgccaaggcattcaccatgcgccctttgtagcttgacctaattattagtcatatcacaaagaatatttattcttggctttgttgtattttatatacattaaatctatgtgcaattttcaaagaacattgaaagacttagtctttcaaaattgaacagaacaaatacttaagtaacctttgagcaagtattttatattttgatacataataatgtatctgtactagtcagacatcatgctgatctagatttctccatagaaaggaggtgatccagccgcaggttctcctacggctaccttgttacgacttcaccccaatcgctgaccctaccttaggtcgctgccccgcttacgcgttagctcacgaactttgggtattgccaactctcatggtgtgacgggcggtgtgtacaaggcccgggaacgtattcaccgcgacattctgattcgcgattactagcaactccagcttcatgtaggcgagtttcagcctacaatccgaactgagactggttttaaagtttggctccacctcacggtttagcatctctctgtaccagccattgtagcacgtgtgtagccctagacataaggggcatgatgatttgacgtcatccccaccttcctcccggttaacccgggcagtctcgctagagtgctcaactaaatggtagcaactaacaataagggttgcgctcgttgcgggacttaacccaacatctcacgacacgagctgacgacaaccatgcaccacctgtcttcctgccccgaagggcttccccgattaagagtaattcaggagatgtcaagtctaggtaaggttcttcgcgttgcttcgaattaaaccacatgctccgctgcttgtgcgggcccccgtcaattcctttgagttttaatcttgcgaccgtactccccaggcggaatacttaatgcgttagcggcggcacagaggtcatgacaacccctacacctagtattcatcgtttacggcgtggactaccagggtatctaatcctgtttgctccccacgctttcgagcctcagtgtcagttacagtccagaaagtcgccttcgccactggtattcttcctaatctctacgcatttcaccgctacactaggaattctactttcctctcctgcactctagatatccagtttggaatgcagcacccaggttaagcccgagtatttcacatcccacttaaatatccacctacgctccctttacgcccagtaaatccggacaacgcttgccacctacgtattaccgcggctgctggcacgtagttagccgtggcttcctcctcaggtaccgtcattatcgtccctgaagacagagctttacaatccgaagaccgtcatcactcacgcggcgttgctgcatcagggtttcccccattgtgcaatattccccactgctgcctcccgtaggagtctgggccgtgtctcagtcccaatgtggccgatcaccctctcaggtcggctacgcatcgtcgccttggtgagccgttacctcaccaactagctaatgcgacgcgggtccatctcatagcggattactcctttaattgctatgccatgcggcactacaatcttatgcggtattaatcttcctttcgaaaggctattcccctctatgaggcaggttacccacgtgttactcacccgtccgccgctaatccgctcccgaaggagcttcatcgctcgacttgcatgtgttaagcacgccgccagcgttcgtcctgagccaggatcaaactctcaataaaaagtttaatcttagcttactcaaataaaaattgctggtttacttaaatgtatttatgttattctgttcaattttcaaagaccaatttttctttcttacaactactgttgtaatgttttgttgttatctgtcgtttctgacagcttactcagtatatcaccgctttcgaagcttgtcaacaacttttaaagaaactttttgaactcatttttcagtagttctattagctttaagttattaatcttacatctcttagcgaggatttcatcatatcatcaccattcgacattgtcaacaactttcgtagaaaacttttaatttcttctttattaaaatcttttcagtcttaagttgttttgtttatgtctcttagcgacgtgttttatcttaacacatagccccttagccattccaacaaaaatcattgtttatataatttaaactttaaaacctccactagcctccatcttccttctactttctactattgatacactaggcatagttacctatttcttacttagtaaataggtatatggtcctacatttaacaccacattcatataactatatataattttatgctacataagtttacttatgcttttattagattttcttcccccaacctcaataaattagtttaattaatgtaaatagaaactgccaaacagtatacatagaaattattttctaaagtatactgtttagcaatttcctatcagccttaatattttatttatatttaatattatttcatccatttactctttagaaaataatttagaaatgtcacatcatttgttaattctggatgaaaggatgtaactataatattatcctgtctagcagccactatcttgtcgtctaccttacataatattcttacattatcctttacctctgttatgtatggagctctaataaagacaagttccatctcatcctttgatattttttctattactttatgagtcttaaaactatctatttgagttccaaatgcatttcttttcacttttatatccataagttgaagatatttttcttcttgaccctctacttcatttgctagtagtatcatacctgcacatgttccccatgtagggagtccactttctattttttcttttaatgattttattaatcctgttatcttaagaagtttgccaatagtagtactttctccacctggaagtattatggcatcaatatcatctaaatctttttcctttttcacttcaacaccagtatgtcctaatgcccttatttgatttaaatgttcaataaccccaccttgaaatgataaaaccccaaccttcattttaccatcctctttcagcatactttgtagctacttcagttgaatttataccactcatagcaccacctaaatcttctgaaacttctgctaatttttcaggattattataatatgtggttgcaagaactattgctctagctcttttttctggattatcagatttaaatatacccgatcctacaaatacaccttcactgcctaattgcatcataagtgcagcatctgctggtgttgcaattccacctgctgcaaaattaactactggaagcttaccattttcccacacatatttaactaattcatatggtgctccataattttttgctatagtcataagttcttcttttgatgcttcttgtatctctttaatttgatcattcattgttctcatatgggtaacagcatttactacatctccagttcctgcttctcccttggttcttatcatcgatgcgccttcacctattcttcttaatgcctcaccaatattagttgcaccacatacaaatgggacactaaaatcttctttatttatatgatatttatcatctgctggtgtaagcacttcactttcatctataaagtcaatatttaatgcttccaaaatttgtgcttctacaaaatgtcctattctaactttggccattacaggaattgagaccgcctcttgtatttcccttatcattttaggatccgacattctagctactccaccttcctttcttatgtcggaaggaactctttcaagcgccattaccgcacatgccccagctttctctgctattatagcttcatctttattagttacatccataataactccaccttttaacatttgagcaagatttctatttattgtccctctttccataatacataaatcccccttttttctaagttactcatataataaaatatgtatggatacaaacgcaaatgtatccatacaataattcttaacttaattagctaatttaaaatataagaatatagtattatgatgaaacaataatccggaatttgttaataaataagaattaatggctaaaatacatagactaggcttctaaaaataccttcaaaataagaatattttcagaaatcaatctaaaattttcttcatattaaatttataactttctactcacaaatatttatatatctcttaaacttacctttgcatacatatgatttatcaactattttaaaacccgcatcaataatacaatcatccatctcttcaaatgtaactatgactaatctagtacttattctgcgtgcacttctaattagagatgtttgttcttctatggtagttggagtaaacagtccatatggtaaatctatgatagcagtatcatatttctcttcaatctcattcatatctccgttagtcactacattctcatatccgtaaaactccaagttcttcttggcattttctgcgatacttttattaatctcacatcctacaacatcaatttccattgaaagcgcttcaagaataactgttcctactccacaacatgggtctattaatttgcattctaaattgtttttaactgctatattaactagtgctctagctaccctaacgcttaaagaatttgaatatgaatacggcttattatcatgaatatgccacttataatcgtttttctcgtacattccaaatatccattttccacaaattcgtgtaactccaaggataactttaggattgtgaatttcaggctctcctgttattacaaatcctatctggctaagacttctaagacgttcttcataatctatatcactatattctgttcttaagtaacagaccttaaactcgttataagctagcttatcttttatgatgttgtctattatttgttctaaagaatcttcttcatatactactgaaatcatttcttttataaacggactccttgatgcactaatataaaaatctgaaaacaaatacttctcacttggtgttttaccaaaaagacatttcatctctaacttacataaatcttcttcaaatacaggatacttaatatagtaaaaatactttttataattattgcaatttaattttattatttttttattcaaccaattcaccatcttcactttaaatataatctaagtattaatattattcttttcaacaataactgtctatatatatcaataaatcaaccttcttacttatttaatattatttataaatcacaatcttagtctgctattattcaaaaattagaatcatccttaaatcgagaacattttgaaaacactcacactttttaaacctataactttactcaacataacattatttttgattaatttataaatcatgataacgtttttataattattttattattttttatataaaatattaaatatcaatcttgtaataattactcctatatgttattatatcaacaatatatacgataactttatagcattttatcaaagtattataaaattaattattattttaatattattttttaaagttaaaagggggataaatatatgaaaaaaagtttactatcaggaatcttagcctctgctatggctattactcttcttgctggttgtagcgggaattcagctggagatggaaataacggagataccatcaaaatcggtgctattggaccattatctggtgctgcatctacttatggagtttcagtaaaagaaggtgctcaattattagaaaaagaagttaacgatgcaggcggaatcaatggaaaaaaaattaaatttgtttttgaagatgatcaagctgatccaaactcatcaatgcaagctttcaataaacttgttgatgatgaaaaggtaagcgcaattttaggacctgttacatcaggtgcaacacttgcagtagcaccaaatgctacatcaaaacaaattccaatgattactccaacagctacagaaccaacaataactaaagttggtggagattatatgtttagaggctgttttgtagattcattccaaggagaggttcttgcaaaatatgctagtgaaaaattaggaaagaaaacagctgcagttttatataactctggatcagattattcaaaaggaatagccgatagctttaaatcaaaatttgaaagtgctggtggacaagttggtgaattcttaacttataatgataaagatactgactttaaggctcaattaacaaaaattaagagcttaaatccagatataatcgtattacctgattactataatgttgttggtcttattgctaaacaagctagagatatgggaataacttctcaattccttggtggagacggatgggagtcagaagaattagctaaaattggtggaaaagctgtagatggtgcattatatatcaatcactactactctggagactcagatgaaaatgtaaagaaatttgttgaatcatataaaaaggaatataacaaagaacccgattcttttgctgctctttcatatgacacatctaaaatattagttaaagcaatagaaaaggccggaaagacagacggtgctgctattaaagatgctttggcttcaatggaaatgaacagtgttactggaaacatcaaatttggtagtgatagaagcgctataaagagtgctgctattattaaagttgatggagataaaaaagttttagctgataaagttaatccttaatcattaaaaaagggaggaatatacaatggaatttttacaacaaatcattaacggtttagcgttaggtagcgtatatgccctcctagcattaggatatacaatggtatatggaataatacagttaataaattttgctcatggtgagatttatatgataggagccttttcaggcttctattgtgcttcaacattaaaattgccattaattccaacattattagttgctatggcagtttcagcattatctggaataattatagagaaaattgcttataagcctttaagaaattctccaagaattgctttgcttattacagctattggtgtttctttattcctacagaatgctatgagattattagttggatctaatccaaaaccatttccggatttaattaatgctgggagtattaatataggaactattcaaattgatataaagacaatattaatgtttggagtttctgcttttctagttgttttactacaatttattgtttataaaactaaagttggaaaagccatgagagcctcttctcaagatatggaagcagcttctcttatggggataaatgttaataatactatttcccttacttttgcaataggttcagccttagctggtatagctggagttttagttgcaatatcttaccctagtatcactccttatatgggagctatgcctggacttaaagcttttgttgctgcagtacttggtggaattggaagtatacctggagcccttgttggtggaattgctataggattacttgaaacttttgctaaagcttatatttcaactaacttctcagatgcaatagtatttgcaattttaattataatacttttaattaagccttctggtctattaggtaaaaagaccaatgtgaaagtgtaggtgttaattatgaagaatttatttaataaaaaaaatatttgtataattgttggagttttaataacatatggagtactatttggcttaataagtgcaaaggttattaattcatattacaaaggaatcattactttcgctttaataaatgttattttagccgtatccctaaatctaattgttggatttactggtcaattatgtttaggacatgctggatttatgtccataggtgcatatgtatcagctataataacacaaaaagcgcatatgccgtttgttgcttcaatacttattggtgctgtggttgcatgtatattagcggcattagttggatatcctacactgaagcttacaggtgactattttgcaataacaaccttagccttttgccaaattatccaaatagtaattatgaatattgatacagttggtggtgcacgtggacttaccggcatcccaacaaaaacaacttttacagttgctttcatattcatgatagctagtatagtcataataaaaaatataattaactcgtcccagggtagagcaatgctttctattcgtgaaaatgaaatagccgctgaatctatgggaatcaatgcattaaaatacaaaatgatggcatttgttatagctgccttttttgcagggcttgctggtggactttatgctcactattctggatatataaaaccagatcttttcgattttaacaaatcaattgactatctaacttttgttgtatttggtggtatgggatctttgtctggatcaattatttcagctataatgctgactttcttaccagagcttttgagaagtatgggcgatttcagaatggttatatatccattagctttaatactacttatgatattcagacctgaaggattattcggagataaagaaatttctcttaaaatctttggtaaattaataccaaggaaaaaatcagatgatagagaggaggcttaattcaatgctagaagttcaaaatttatcaattgtattcggtggattaaaggcagtgtcagattttaatctaacaataaatgaaaaagaaattgtcgggcttattggacctaatggcgctggtaagactactgtatttaacatgttaactggtgtttatactccaactgaaggtactatatcttatcttggagaaaagattcaaggtcttaaaccctataatattacacaaaagaaaatagccagaacttttcaaaatatacgtctattttctcatctttctgttcttgataatgttaaagtaagttttaactatagaataaattattctatatttgattccatctttagaactcctaaatttaggaaaacagaagctgaaattatagataaaagtattgaactattaaaagtcttttctctcgatggaaaaaaagatgagttagctagcaatctcccttatggcgaacaaagaaaacttgagatagtaagagccttagctgcaaagccatctcttctattattagatgaacctgctgctggtatgaatcctcaggaaactgtagaacttaccaagcttatagattggattaaagataagtttaatatatcaattcttttaattgagcatgatatgaaacttgttatgggaatctgtgataaaatagcagtccttgattacggaaaaaagattgctgaaggcactccagaggaaataaaaaataatcctaaggtaattgaagcttatctaggagagggggcttaaaaatgctaaaggtagaaaatattaatctatattatggtgtaattcatgcactaagggacatttcccttgaagtaaaacagggtgaaatagtgacattaataggcgccaacggtgctggcaaaacttctactcttagagctatatcaggccttgaaccaataaaatctggtacggtcacttttaagggctctgaattaaataaggttgcagctaataaaatagtttctctaggtctttcccatgtaccagaaggaagaagagtttttcctcagctatcggtcttagaaaatctagaactaggtgcttatttaagaaacgataaagcagaaattaaaaaagacatggaaatggtatttgctaagtttccaagacttaaagaaagaataaagcaacaagctggtactctttctggtggtgaacagcaaatgcttgcaatcggaagggctcttatgaacagacctgaaatgcttatattagatgagccttcaatggggcttgcacctcttgtggttaaagatatttttgatacaattgttgaaattaataaatcaggaacaactatacttttagttgagcaaaatgcaaatatggcccttgccattgcacatagagcttatgttcttgaaaccggtaatatagtaaaatcaggtaatgcccaagttcttcttaatgatgaaagtattaagagtgcatatcttggtgaataactattcaaattaagttactattaaaaaaagactgatgatcgaatcagtctttttcttataagcataaacaaaaattccagcaccaattataatccacaatagaattactaatatattatacgcaaaatttatatttaaaggttcattagtaaaaattctgcctggtaatacttgcatgttatagttaggtaaaaaattagctgccattccggctatattattcatttttgctaaagtacccgctaaaaatataaccatgaaaaacggcattcctatgatttctgcactagcctgattttctgctaaaattcctattaccatccaggttatataaaccatataactactaatgttgttataataataaaatgtcccgtgtaaggaatcttcattcccataatgaagtatgttagcatattaactacttatctgcaatctctagcaatgagaactttaacattatttctctgtaattagactttgagtcaattatttctgtgtaatatctcatatattcttctactgtaaatctttcataaaaaccttcatctctaaatataacaccaatatttcctttgtttttatgaatataatcgctatgttttatttgatctatatatttcaccactaccaattacttctttatctaatataagatctattaatgtattactaaactctctatctgcttcactgcttaccaagtttccattttcaaccataagatttatatcgtttatgaaactattagtttgctttttatataaatttttttattttcaacattataaattattcttcttgacttatacattcagttaattaatatacattctagtcaaatcattacactagtttgtaatgatagcaatagtaggcttcaacattccataaataccataatgtaaaattcaattgaatttcatattatattaaattttataaacgacgaatagataattttattaatgataaactaaatttgtataaatgaaataaaaggaggttataatttatgagctacgaagaaaaagaatctctaaaaaatgaggcaaaaaaaatgatgattgatggagaacactggagtgcaattagagaaaaaactcatctaagactaaaagatttacgaagaattcaaagggatgaaataaatcctaagttctaaacttaaaattcattacacttaacaatgatagataatactataaattaaaatactatgattttattactaactactaagcaaggtaatatatattttagaggtttctccaaactttctataaatatatatttactttgcttattttattatgcttaagcataatatatattatagaaaaagttgaaaatttttgaattttctgaatattttgttgtataatatatatgtataacaaatttatataaaaaataaaggggatgttttaaatggtaccatattttatgcttatttatagtgttataattatttcacttatagcaatcatttatttggtcaggtatacattttctcaagacaaaggcactagccaaatgcaagaaatatcaacttacattaaggaaggtgctatggcattcattaaaagacaatataaaaccatctttgttttatccattgttgctttatttttaatcatactttctaactatttcggcaatgcatcaaaaggtccaagctctgccatatctatatctttacatacaggtatagcttttataacaggcgcattctgctcagctttatctggctatattggtatgtatatggctgtcaattctaatgtaagagctgctgctggcgcaaaaaagggattaaacaatgctcttcaaatagctcttaaaggtggtgctgttactggactagccgttacttccctatctcttttaggtgtagcgtccctatttcttatctatggaggtatttctggaaacgatactttaattaaagaagccccctctcttatagttggatttgggtttggtgcttccttcgtcgcgttatttgctcaacttggtggaggcatatatacaaaggctgccgatgttggtgctgatctcgtcggaaaggttgaagctggtatccctgaagatgaccctagaaatcctgctgtcattgctgatcttgttggtgataatgtaggtgattgtgctggtagaggtgcggacttattcgaatctacagccgctgagaatataggtgctatgattctaggcgttggactttaccctatatttggatggaaaggaatactatttccgcttgttgctcgtgcccttggtatcatcgcttcaataataggtatctttgctgttaaagttaagaatgataatgatgatcctatgaaagctttaaaaggtggatttgttataacttccataattaatttagtaatattatttttcgtagttaaagatatgttaagcggttcacttacaacaggtgggcaagtaaactatatctatctatatggatgtgcagttgctggaatactgcttagctatgtatttgtagttttaactgattattatacttcaataacccataaacctgttaaagagatagctactgcttctaaaactggagctggaactaatataataactggattatcagttggtatggaatcaactgcacttcctgttgtttgtatatctatttgtatatttatatcttatagattaagcgaaatggcattgcctaatgttgcaaatgcaggtttgtatggtacagcaattgcaaccatgggaatgctttcaacctgcacatatattcttgccatggatacatttggtccaattactgataatgctggtggaattacagaaatgtccggggctcccgaagaaattagaaatataactgatagattagacgcatgcggtaatactacaaaagcattaacaaaggggtacgccgtaggttcagctgcactcgctacttttctattattctctgcatacctagatgaagttaaaaaacttcttggaaaacctttagattcatggttttcagttgatataggtaaacctgaagtatttataggtggctttataggagctatgatagtatttctatttagctctacagctattagagctgttggtaaggctgctcaatatgtaatacttgaagttagacaacaatttaaagaaataccaggaataatggagggaacatcgaaacctgattatgctcgctgtgttgatatagttacaaaaggtgctctaaaggagatggttcttcctggaatcatagtaatttctgcccctataatcgttggagttcttctaggaaaagaagctgctgctggattcctaatgatagcaaccatttctggtgttataatggctctcttcttaaataatggtggtggtgcatgggacaatgctaagaagcttatagaattaggagagcacggtggtaaaaattccgaagcccacagagctagtgtcgtcggtgatacagttggtgatccatttaaagatactgctggaccatcactccatgtacttataaaacttgtaagtactttaactttagtatttgtcgcattattcgcataaattaatattatttatttataaaaaggatctgtagtagataatttaacgctgcatatcctttttttataatttattcaactttttttaccaatgtataatgcttttattttgttacttatactaaattatatttaatatcttatatatacttttattgagatatacttaattatataattgttttatatacaacttatgtatacagttactaataatttatttaaaaagggggataaaatttaatggatgaaaaatatgtagttattatccagtgcgacatttctcataaccgttgtagtggatttgcctgcacaaatgccttttacaacagagatgacgtttttaaaaattataacgaatcaactagatatatttcctttacctgtggaggatgctgtggaaaaagtattgctactaaattagaacatctctcaaaaaaacttaagttaaaaaataacataaataaagaagatgttgtgatacatttatcatcttgcatgacaaatgataattatcattatgatagatgtcctcatctagattatattaaatctattgtatccaaaaaaggatataataaagttatagaaggttcttatataagtaagaatgctgagaaaaaaagagccaatggcagttataactgctatgactcaatataaacgtaaaggcaggatatatattctgccttcctaatattacgttactcagtttcagtattcttcatgcttctcaaatattttctcaatactgctttatctactatttctgaatagatttctggtgcctgtttctgaattgcatttattttatctgttaaattactatatactctagtaatatcattatatttatcgcataacagtttatttttcatttgtatgatcttatcagtctgctctgtccttgtaataggttgagtagtgtgcggtttatcaaatgttaaacctacagtatttccatttacaataaactccttattttcttcatatcctatcttttttattgcttctacaaaggaactgcacatttcttcatcctttaaagtaatatttaaatacatcactaattcagaaggctctgaatattcaccaagtttaaagcctgctaaccaccaatgcttatcatctagcgcgaaaagtgtttttccattcttttttagcgaaagagagattgttaatctatcttcatcgctagcgcaattataaaacatatacttatatacttctggtaagtttaatataggcttttcggctgtatacacaccgacttcacatccagtattcaaatcgtattgacctttccataattcgattaaccatattctattattatatttaaaatagattggttcacaatctactatcattccaaaaggtgctgatgcttcatcatacaatctactatatcccatatttctttgccatgcattcatattactataaaatatatcttgtaccgaatcataatcataaccggcaatctctattcctttatctattggcttttcatatttaataattcccaataaacttttattcatatttttcagtatacggattccagtaagcattgttataaaagatccaaacataataagcctcacctcaaataaattgctttacttatatagtattccctttataatcattatgttaaaagacactcatgaattttattttaatgtatattattattcattctatttaattgcgatatcgcaataacctaaacattgacaattacaaaaaattgtactatgataaattataccaaatgggtatactttaaggagtaaattttatgaatattaatcaagaatctgattacgcatttagaataatacttatgctatccaaagaaggtttagataacaaacttgatgcaaaatctctatctgaaaaaggaaatattcctcttagatttttattaaaactaactagaaagttaactcaagcaggaatattaaagtcttatagaggtgttaatggtggttatgctataactagggagcctaaagatataaccttaaaagatgtggttgaagctatacaaggtccaattattgtgaccagatgtgtttacgatggcaaggcttgtagtgcaaataaagctggtcactgttctatacacaaggctttatacaatattcaaaatacaatgataaatgaactagaaaaggttaactttgataaactaaagaatgatccatggtaactttatacatgtaaatataagaggcgaaagccttttatatttgcttaaaactatacctctttagtatacttttggttaaatattaaatataaaattaaaggagatgatcaatatgtcaatgtgcacatcagcagattgtaaattatgtgaatttttatcatcaaaagaagatctagaaacatcattcaacagagttgaaacacaaaaagcaaaatgtaaattcggaaaagaaggagtctgttgcaaactctgctcgaatggtccatgtaagataacacctaaatcacctaaaggtgtatgtggtgcggatgctgatactatcgtatcaagaaactttttaagagcgatagcagcaggttccgcatgttaccttcacgtagtggaaactacagcaagaaaccttaaagacattggtgaaggaaaaggtaatttaaaaataaaaagcccagaaacattggataagcttgctgaaatctttgatattgttgaatcagatataaatgccaaagcaattaaagtagctgatgaagttcttagggatttatataaaccaagatttgaaaaaatggaattggtagaaaaattagcttatgctccaagatatcataagtggaaggaattaaatattttacctggcggtgcaaaatccgaagtttttgatgctctagtaaaaacttcaacaaatctaaatagtaatcctgtagatatgctgcttaattcacttcaacttggaattgctactggaatatatggtctagtgttaactaaccttttaaatgatgttatgctaggtgctccaaaaatcagacaagctaaagttggctttagagtaatagatgaggattatatcaacataatgattacaggtcatcagcattctgatattgcacatcttcaagataaattaattgatgagaatgtcacaaaaagagcaatgaaattaggtgcaaagggctttagattagttggctgtacatgcgtaggccaagatctacagttaagaggagagcattatactgaagttttttcaggccatgctggaaataattatacaagtgaagccgtactcgcaactggtgctatagatttaattgtctcagaatttaactgtacaataccaggacttgaacctgtagctgagaaatttaatgtaaaaactatctgtatagatgatgttgctaagaagaaaaatgctgaatatataaattttgatatgagaaacgctgaagaaattagtgaaaagatcatttacgaagcattagaaagttataagaacagaagaaataacgtcacaatagacattcctaaagatcatggacataatgatgttgtaactggtgttagtgaaggatctttaaaagagttcctaggtggaaattggagcggtcttattgacttaatagcaaaaggaaaaatcaaagggatagctggtgttgtaggctgttccaacttaacagctaaaggacatgatgtatttactgttgagctaactaaagaattaataaaaagagatattttagttctttcagccggatgttcttctggaggccttgaaaatgttggtcttatgtctcctggagcagctgatcttgcaggtgataatctaagagatgtgtgcaaatccctaggcattccaccagtattaaactttggtccatgtctagctattggaagattagaaatggtagcaactgaacttgctgaaaacttgggtatagatatacctcaacttccccttgtattatcagcaccacaatggcttgaagagcaagcattagccgatgctgcatttggactatcattaggtctgccactacatgttgcaatatctccttttatagatggaagtgaagttgtcactaaagttttaaaagaagatttagttaatataacaggcggtaagcttattgttcaagaagatgtaatcaaagctgctgatgagttagaggagattatcgaaaacagaagaataggattaaacatataagaacccattaaatataggaaataagaaaccatatttttaatatctataatgaatctggataataacacattcagattcatttttttattgaaatacatattatgaattaacttctttatcctatataattgattttttaataatatgtctcaacattatgaaccttcaagctaatcttaagtgctattatctttattataattttaatcaactcgttattataatttgcgagttgattaaaattcatatcttttctgtattatttcattgattcaataatgctatcagcaatagattccattaaatcctcatcgctttctttcatgctagaattaattgaaatttcattatccaaaatagtcatatctttcatttcttctaataattcacgcattaatttacctgattgaggcgcccatgatccattttcaataatagcaaaagtacgtttttgaaggtttaatgccttcatatccattatatagtccagcattggtggataaatctttaaattataagtaactgatgctaacacaacgtgactatatttaaatgtttcagaaatcagatacgaaacatgagttttggaaacatcatacataactacattggtaatcccctttttaaccaatcttgttgctaactcatttgctgctgcctctgtattaccatacattgttccataaacaatcatcacgcccttttcctcaggtgtgtagctactccatttatcgtacttatcaagtaaatatccaaaatcattacgccatactggtccatgtaacggacagataatcttaatatctatagtgcctgccttttttaaaagagcctgaacatgaggcccatatttacctacaatatttgtgtaataccttctagcatcatcaatccaatcacgatcaaaatttacttcatcgttaaatagctttccatctaatgcaccaaatgaaccaaaagcatcagctgagaacagtactccatttgtagtatcatatgttaccatagcctctggccaatgtaccataggggcagaaacaaatacaacattatgctttccaaatgacatagtatctccctctttgacttgttctaccttatcttctatttggaaaccgaactgatgcataaataaaaatgccttctcagtacatattatctttacattaggatagcggataacaatttcttcaatacacgctgcatgatcaggttccatatggttaatgaccatgtaatctaagtctctatctcctaaaactcccttaatattctcaagaaattgtctgcaaattgaccaatctacagtatcaaatagcactgtcttttcatctaaaagtaaataagaattataagaaacacctcttggaataggatgaacattttcaaaaagagctagacgacgatcatttccccctatccaataaagatcttcagttacttctctaacacaatacatagctaatcctcctttaaacaaaaaatttatttattacctgttttaaacttctataaacatatctttttcttcaccacaagctgggcaagtccactcttcaggtaaattttcaaaaagtgttcctgggtttacttcaccttctagatcacctactccaggatcatattcataaccgcatccattacatacataatgtttccaagttggagtgacttttttcggaataactctcttcatctttttcattggtggagcctctttctttggttcaccattgtctaaagcttcaataagtagaggtagtatttccatcaaatcaccaacaataccgtaatctgagtttttgaaaatctttgcattagggtttatattaattgcaacaattgtagaagcatcttttataccctttaaatgttgacctgcacctgaaataccacatgcaatataaagatttcctttaaacttttgtcctgacataccaacataacgatcaattggaacatattttaaagtttcagctactggtctagaagaacctattgctgcaccagcctgaactgcaagcttttctataagattcatattttccttttctcctatgccttgtcctacactaactactctctctgccttgcttattggagtatctataggaattcccactgagaaatcatatccatccttcttaagagcttccacaagagaatttactctctcttcaggtgtgccatctttataaattactttcttacgatatcctgttgcaggttcccttgaagtttttgctacactctctgtttttggcatttttcctataatattagcggctataacaacacgctggatttcattagttccttcatatatagtgcatattttagcatctctataggcacgctcaacttccatacctttaagatacccgcttcccccaaagatttgaagcgcatcattgacaatttcaagacaaacatcagaagcatattgtttagccattgctgcttccatgctgtagtgctcatgatttcctttaagctctgctgcactataaataaggaatcttgctgctctaagttttgtagccatatcagctaatttaaaagctattatttgttgctgacaaataggtttaccaaattgaactctttcttttgaatactctaaggcattctcataagcaccttgtgctattcctaaagcttgggcagcaataccgatacgtccaccatctaatgtagacatagcaattttgaaaccatcgccttctttacctaataaattttccttaggcacctttacatcattaaaaataagctctgcagtagctgatgaacgaattcccatcttatcataatgcttaccaaaactaaaaccttctgatcccttttcaacgataaatgcactaatacctcgtgtaccaatgtttggtgtagttactgcaaaaacaatataaatatcagcctcaccaccattagtgataaatattttctcgccatttaagatataataatctccttctagtacagcagttgtttctgttcctcctgcatcactacctgcattttcttcagtcaaaccaaatgctccaagcttttcaccctttgctaatggtactaaatatttttgtttttgctcctcatttccaaaagctgcaattggatatgttcctaatgatgtatgtgcagataagattacgcctgtcccgccatcaactcttgataattcctcgacagctatcgcatagctaatcacatctaagccagctcctccatactcttttgaatacggaatacccatcactcccatatcagctagcctttgaactacttccgaagggaatttattttcttgatccaacataaatgcaataggtttaacttcctcttcggcaaattctcttatttttgttctcaaattttcatgttgttctgtagttttgaaaaacataaatacacctccctttaattatacggtttcaccaatgtcattctataaaatctgtaaaaccatattcccaaacatattccttaaatgtatacctaaaccgtatacatttattgtatacctataaggtatacttttcaactgttattttatctattttattccataatagacaattaaagcttaaaactcctcctcttttaaagataatataacttttccttccattatcttataaaagcaattatttttacttgtaaggtttttctttatttctattcccccttatttaatttaagatatatttaaagtttctatatttatatcaacacttataattatgctatttacaatactattattaacattaatataaactataataaaaaaaagcagatacgaattacgtaactactattttttattgatttaatttatttttcttttatgtctacttatgatatggttcacctttaattattctaaatcctctataaatttgctctaatagcattactctaaaaagctgatgtggaaatgtcatctttgaaaagcataatttataattagctcttgctaaaacactttttgagattcctaggcttcctcctattataaatgctatattgggatttcctgttacccccaagttatctatgtatcctgcaaattcttctgatgttagttgctttccacctaaatccattgctataacgaacatattgtctttaattttatttagtattccttgcccctctttctctttaattacctcttcttctttttctgaagcattatctggtgttttttcatccaccaattcaactatatctaatttgcaataccttcccaatctttttgaatattcttctatagcatcccttaaatacttttcctttattttaccaactgttattatcgttatgttcattgttatctcctttaattattttatgcatacctatattataactaaaaataaaaactgtagctaaattctttactcagctacagtttttatttcttaatactatttatattttatactaagttttaaactaacaacaattagagatatcattctattcatttatagagcttcaactttaattctagattttgtcttatatagtctgtatgctgttaacaccgctcctaatgcacatattatagctgcagcaacatatacatattgcatcccatatacaaaaatatcatctcttccctctatatatcctgtaacatgatatcctatttgactactcatcctattgtataaaagagttgttgatagtgatattccaaaaaccattcctaaatttctaactaacgcatttatacttccagcaatccctaaattttttgtatctactgtagacataactaatgaattatttggtgactgaaacatcccatttcctagtgtcattattgctataaaggcaattaatgcacctatgtgagaatattcatttaaagttgatattaaaaataaacctaggctagttccaataagtcctaaaaatgttaaaacttcagatcctattctatctgatatatacccactcattggagcaacaactgataaaattattggtgataccatcattaatacaccagtaactgaaggagctagtttcatcacgtattgtaggtaaaatggcaatataatatttgaacaacttattgccacaaatgaaatgaatgcacaaaaaatactgagcgaaaataatgaattactaaatatctctagtttcaataatggttcatcaattcttttttcaacaattataaataaaataaataatataatagagacaacaaatgatataatgattcctatattgtcatatccaatttccttgccaaaagttaaagcactgaataaaagtaccatagttgatccaaataaagttgcaccttttatatctaatttttcatttgaattattagaatttttaggaagtgtcttcattgctaaagctaatgccaaaattcctataggcacatttattaaaaaaatatactgccaacttaaaatcgatacaattattcctcctactggtggacctatcattgaacctaatgctacaaaagttccatttaatcctagcgcccttcctctttcgtttcttggaaaaacctgagttataattccttgacttgtagacatggttcctgcagctccaattgcttgcaatattctcgagaagactaacattactaatgaattagataatccacataaaagtgaaccaatcgtgaaaataattatacccaatttaaaaactgaagttttacccttaatatcagctaatcttccaaatataagaatagttcctacaataactattaaatagctcgttactacccattctatagatgccatacttactgcaagcctctgcgacattacaggaagtgctacattcactatactactatcaagtgtggacataaatgtcagtagtacagtagtaaataatattaaccatctttttttatccgtactttccatatgttttatcctttctgtttatacatgttttatctagctgtaaaaatagaatttatatataataactcaacattcataaacctaattacaacttatatagttgcacttgcaactatataaaattataatatatttttattatttacacaaatggtatgataattctctaaatataaaaatataatccacattttaaagttcataaaaaaaattatccacattttattctaattctatggataaagttctttatattatttgtacagttttaatatgtatgttctaaaaagtttgctttatagaaatttaattgtattgacttgattatcctctaattattaaaccatgcttttgctaacatgctatcaaaaaaactgcgtgcaaataatgtttccaaatgatagattaaaaattcactaataattaagacttactattaatttcctcttacattaacaaaagcatgatattaattatattttatattattttttactttaatttaaatgatccaaccatctcatttaaattatctgacgaatattccagtacatcggttgcttgctttagttgtcttatttctaataatatttttttaaccatagacagtgattcttcacttttatttgaactattttcggtagattgttctattttatctgccatagtgcttacattattcataacatccccaacactttggctctgggtcgaagttatttctgatattgactgcatcgcattagctattatatttacatcatcattaatatgatcaaatgattgaatagattcttttacactcgctgtagatatatctaccttagtatttatctcttctgcatattcaaatgttgcttgtgtctgtttttggacttgattaatgacattacttattgacttggtagcactttctgtttctagtgctagcttagatatttcttccgctactacagaaaatccttttccactctctcctgctcttgcagcttcaattgatgcattaagcgctagaagttgtgtctgcttacttatatttcttataacattaattacttcacttatctcctgtgaatatccctgtaaagtacttatagattctactgtattctcgatggtcttttctaaatcctccatattactcaagacttcttttgatatgctttgtgccgatgctgcactttcattagttccttcaactatacctgatacttctaatataagactatccatttcctgaatagatgctgtaatatctgaaaatttgtttttggtattttggaatactagattttggtctttagaattttccagtaaagttatcactgtattttcaatgactcccattccatttttaacttcgcttgttatattagaaactatatttactgatttttttgtagttttagctgatcttttcactctatataacatgctcatctgattatttatgaatttattgaaccatcgcgacagctctccgatttcatctgatgacattttttcaactcttttggttaaatttccttcgccttccgcaatatcttgtaatatatttatcgttctacttaaaggggatgaaatcattcttttagatattaataacgaaaacagtgataatataatccacattgctatagatgtaaatatactattattcggtgataatttaattgctataaaatttactgcaattaaaattgctgatattattgatatagatattggcatctttaaattaatactttgaaaattatatatctcagctatatcaccttcacacatcattccccatacctcatcacagttcgggggggttattaatgttcctttacctcccaccattatatgtctgtaatctggatatccaggccaacaatctaggttttcaccatttcgaattgtattttcaactcctcgatgtaatttacttgtagccggatcattaaaaattatttcaaattcggtatgctctttaattctaactgtaccccaactctttgttttaactccatctttaagattctcccctaacgtaaatgtattatcctcaaatctgcttctagatattgctgttccgggcttaatatctctgctagtcttcaccataaataagtaattatctccagaatccttatatatatgagtatcctcatcttgaattacgttgctcatatcatcatctagtgttctgcagcataatattctaatttgattactgtgatttttgcatgtactggaaaacattaatgtaacatcatcagcaaatttcttattacttatatcagtatgtagggttcttttatcaatatatggtccatacattaaaggcctaccttctaatcccgcttttagattaggtaaatcactcatatctaatccaatatgctctttgcacgaagaaactgatactattcctttctcatctaaaacaaatatttcgcaaaagtcctcgtgcttttttacggtttcaattaaataattacatactatattatcattgtcttctaatgccacaagtgaattcttaatattttctaattgtgcccacttgtcattaaaccagttatctaatgccttttttcttccatttgatattccttcaaatactttttctgaatgttcctttagatttctattcaacagatatttaagctttaaactcatagcaatccccccatatattattcttatatctactttttaataaaaaaataaagcactaaatacagattttttaaatccgtacttgtgcttccatagcattactatttatttactacaattccttgtataacataattataccaactatattgacctttgtgaattgttatttttcacgaaaccattaataaagaaaaaaaccctatctaaactagggttttttactacattgaatagtaaactcctctaaatatagagtttacttatatgtaatcatattatttatcttttccacaacatttcttatatttcttcccacttccacatgggcacatatcatttcttccaaccttatctagatttcttactatcttagattccttgtattgtttttgtatttcatttcttttttccactgagaatattccatcccattgtggtaatgtgtataaatattctgcttttgcatctagcatattcaaatataaagtttctagatttatatcaagtactatttctgtatcagcatctatagtctcaagatcatattgagtttttaaactatcattaataccatccataaatcccatagcaaattctactgtggaatcataatctttagctaattcatttattgtagtctttttaacacttttatgattagctaataaatctttatatattgatttttctaatttactatattcttcccagaaagcattttctcccttagtttttacatagtcaacaaccatgtcagtccaatttgtatataaactcatttttaagtcctcccttaaatcttcattgattatatataatatatttctataaattataagctcaaataaactatatctctatataactgctaggattatgtctgtttgccatagttaatattatgtcctcttttagcttaattccattttcatttagcacgtttaaaacagtttgatatgctaaatctggttgattattagtattactcaaatgacctaaaataatctttttcttagttgaacctttatatagttcaactatggcactcccacaatcatcattagataaatgtcctatttcgctcaatatcctacgtttcaaaggatatggatatggtccaaacttaagcatatttacatcgtgattactttcaagaagaataacttctgaatcttttatattatcataaatttctcttgtaaaagttccaaaatcagttgctacacttatgcttttttctcctgagctaactgtatatcccattggtgcggctgcatcatgcggaatattaaatgctttaatactcatatcttctatttcagtaaatgatcttttatcaattacttttatgttatgctcttttatatttccaattaagctttccatagcagaccaagtatcagcatttgcatatataggaatgtcatactttctagacagtactccaacccctttgatatggtcactatgctcatgagttataaaaattccgttcaagtcttttggattttcattaatttcttgcaacgccaaatcaatttttttacctgggagtcctgcatcaattaatatcttagctttatttgaggcaataaacatactattaccgctactgccactatataaagaacaaaatatcattccaatctcctcccctttaatttatactattcatcaacttctattctcttaatatctgcccctaaagctctaaacttattttctatatgaggatatcctctatcaatatgctctatactagttatttcagttgttccctctgcaactaatcccgcaataaccatggcagcacctgctcttaaatctgttgcctttactactgcgcctgtcaatttttgcgctccatctataatcgcaactctgccttcaactttaatattggctcccatttttttcaattcatctatgtgtttatgcctattctcccaaatagattcagtaattaagcttcttcccggcacaatacttagcaatgttgacattggttgctgaatatccgttggaaatcctggatatggtgtggtttttatattcacacccttaagtggtgacttcacggtaactctaatacaatcatcaccttcttcaatcactgcccccatctctgtaagcttagctgtaattgattctaaatgctttggtataacatttcttatataaacatctccacctgtagcaacagctgctatcatgaatgtaccagcttcaatttgatctggtattacgctataagaacagccttttaggctttctactcctttaattcttattacatctgttcctgcgcctcttatgtcagctcccattgaatttaagaaattcgcaacatcaacaacatgaggttcctttgctacattttctagcactgttaccccctctgctaatgttgccgcaatcataacatttattgttgctcctactgaaactacatcaaaaaatatattagcgcctactagcttatcagctttaacattaactgctccgtgctctataaacacatcagctcctaaagcttcaaatccttttatatgttggtcaattggtcttacccctattgaacatcctcctggaagaactactcttgctttcttaaatcgtgctaataaagctccaatgaaataatatgaagctctcattcttctaacatcatccgtgcacgcatcaaaattatttacattagaactatctatttctaaagtattgttatctatcttaataatatcgcaacctaagcttctaagtattctttccaagcagtgtacatcttcaatatctggtatgttatcaattatgcattttccatcacttgccattatagctgctggtaatattgctactgctgcattcttggccccattgatatcaacagtaccttctagcaagtttccgccgtttataactaatctctccattgaattcaccctatctattaaaatctatattatcatatatattattttacattattaacctattttataattaaaatctactttaattattatatcataaactaaatttatttaaatacattttttcagtccatcaacacttttttaactatatatgtgttacaacacaatttttcttttggttttgttgtaattatatcccttaaaacatatattactggaataaatatttcttttattgaaaaaatatccttgaaaacctaattattcttgacattactgttcattactatttaattattcttctattcttttattctatttattgtgttataatttactaagatttttattaatacaatatattgagattgtgaggtttatcatgaagtactatatagttgcattatttgatgaggaaacctatcaagtaatatcaccaatacaaaggaatatgtcaaaaaaattcagagcaaatagaaactcacctatgccttttgtcttattaacatctattgaaaatccaaatttggataaattatatccagttgttgataaaattatagcaccttataaaagttttagaattgatgcaagtgattcagtttatttgtttgagcctacaaaaagtataaatttaaaaatagacgataaaggttatataaggagactttctcgtaggctttttgatatattagaacttaacggatttactgttaagtcttttggagatagttttatttcacttgcaaatttaggttatcttcctaaggactataaaaagcaagatgtaaagctaaatttccctgagatatataatagtgataactttgttaaattaagaattaagagtgttgaaatatggaagcttcctacggtaaaaaagaatactcccctaaaatcttatgttttgaaagacttttagtttaagcgttcttactatcataataaatcgtctgttaaacaatccaattagtttatgtttttaagactgtagtgaatttttatattcagtatagtcttttttaatattttttaaaatcactctaaatctatagttatattttccttgaaagtaaaattaatttaaaaataatctcttaatttcgaattttctaaaaatatttttttgtagtcgttttccgaactttcatttattttaaagattttgtaaaataatattattattagaaatgtaggaggattcactatgaatattcagccactatttaaagtacaaaaaaaatacaatgatagtttatctataaatgaagagctagactcccacaaattgcgagtacgcaaaaacctagaatttgaaatctctcttggtgcattagctagtgaaactaattgttttagctacttactaaaaaaatctagacctgttaacatcagtgctatattcgataagtatataacttgtatttctcaagtcttaacactaggtattgatcataaatatacagatttaattgcagtatctatggcacctaatgactattgtttaagtgatcagtttctaaacctatatattgacataaatgatttaattgctttcccatctatagatcactacttaactttatttgaagacctattaagtctaggattgacattaggtttttcagaatctcaaatacaaaatcaatttattaaggatttagacaacttggttatactttaattaatgcattcatgctaattacataacaccatttttattttttataatatttaatattcttaggggaataataattctgaggtgatgttatgtttggaataatatgtgcaataatttctggaattgctatgagtattcaaggtgtatttaataccagactaggtgagaaaatcggagtatgggaaactacattattagttcagataattgcccttgtcttaagccttatcatttttttatttttaggtgatggtaattattctaatttgaaggattccaacaagctttatttattaggtggcgcactaggggttgttataacctttaccgtaataaaaagtgttagctcaatgggacctaccttcggtattggtattatattaatatcccaattacttgctgctgcacttatagatgcctttgggttatttggcagtgaacggcttagattttcattaaatcattttttaggtattgctattatgattgctggtattgtaatatttaagtggaatcattaggagaggacggagaggacttgaatcttttttctaacattaattttttattccatttaacaattaacaatataaaagaatatgtaaaaaaaagcgctgaaataaaatctgataaaattatggaaaattcaattaattggtttggtcatgctaccacaattattaatctatcaaataaaattattataactgaccctgtattttccaattccttaggatattttaagagacttgtgaaaaaaccagtatacataaatgatttaaaagtagactatatactactatctcatggacatatggatcatttaaatttttcatctctaaaaaaattaaataaagatgctgtctttattgttccaaaaggatatacccgtattgctagactgcttggttttaaaaatgtatttttattacatcctggagatgtatataaagatgactttataaaaattactgcttacgaagctaatcatgatgggagacgcttctattttggacatgatgatgaaagtatttcatttttaatcgaaagagaaaataaaagagtgttcttcgcaggcgatacagcgctcacagataattttaagaatatatcctgtgatgttgcattaatgcctgtaggttgttataaacctgatagattttcgcatatgcattgtacgccagaacagagttatgaaatgtttaaaatgatgtcttgccctacaatgataccaattcactataaaacttttaaaatttcattagagaattttcaggagactgaagaatcattattaaatttaaatgataaagctataaaaattatagacataggggagacctacagtttttaaatagtagattgattattatttttattcaagtttcatacttgtatttatttttaataatcaatctactatttaattttttgtacaatctcttcatctatttaatcaaaattatataacaaaaatttttttaacccttcattttttattaacaataaaattctttttcatataatatattgaagtaataatattttggagaaatatatgttttcatctaaaagtaagctagaccataatctaaaagattatatatcaaaaaatgcttataaaagttatagaatacttatacaatataaagattttcaatcttcagtagtaaaaaaaatcagttcatataaaggtactgtacatcacattattgaatcctctaatattataagtgccgaactaaattcaagaggtatagatagaatttctgaatatcctgaaattaaaaaaatttacttggatgaatacctgtttttgtgtggaatgagcgtgactactgcaaataaaatccacttttcggaaaagtacagtttatctggtgcaggagtaggaataggacttgtagatagtggaatatttcctcatcaagatctaacttcccctagcactaaaatagagttattcgaagatttaattaataactttcgctatccttatgatgataatggacatggtacctccatggccggaattttgtgtagcagtggtatctcatcaaataatatgtataaaggaatttgtaataaaagtaagctattctgttacaaggcatttgataaacttggtaaaggatttgcttcggatatattatattccatagaaagtttatctaatatatctaaagaaaataacataaaggtattatgtttgccttttgaacttttaactcataatacattcattatctcttgctttgatttgacatttaagtatgctatatcaaaaggattaattccgatagttcctagcggaagtaacctgagtgaaaaaacttctattatgggaattgctacgctaccaagctgtatcactataggtggtctaaattcaactacctccataatgaagccttatacttattcttctgcaggaccatatgggaaattattaaaacctgatttatctgctgcatgtgttaatattatatctttgaattctgataataactatatttcagaaaagaacggaattaaggtttatccaaataaacttgaagtaccatataaaacttttacaggatcatctattgctacagcctatattagtggattatgtgcgttattatgtgagaaaaatccgtcaataactttcaaagatatgatttccttattaaaggttgcatgtgatcctattgatgagatatcaaatcaaattcaaggcgaaggtattgtaaatataaataaactcatcatatgattatttattttaatgaatattatccatatttagaagcatgcatttgttttattaaattagttaatttcttataaagacaaatgcatgctctttatcttctctcaaatcttatataaaagtaattaatcccaagtattagttgattaatatttcgctttattaaggtgataatatgctataattattttacatacattaggttattatataacttacattataaacgattatgctaatctaatattattagatagagttttgtttttataatatatattaaaaactttgaaaggtaggtagtaaacggaatgagcacatttatgttaaagaatagatctctagggttcactcctgttaacaatgtatttatagaaaaatacatgccacaggctagaggcgaatttgtaaaagtttatttattgatgctaaagtatactatttctggtgaattaggcgttagctcatcaatactagcttcctcgcttaatttgttagaatcagacattatgaatgcatttaattattggaatgatcaaggagctataaagctaactcagatagataagatgggtaattttaatgtagaattcgtagatttagttgaagaaccctccaaatctactaaacaagttgacttattagaagctttggatagtacaaatactaaagatatgctaaaggatattgaaactcttctagctagacctctatcgccaaacgaaatgtcactttacttaaattggcaaaaggaattcggtttttcatctgaattaattctgattttaatggaatactgtatatcaaagggaaaaagtgattctagatatatagaaaaggttgctatagcttggcatgatcaaaaaataaccactatcgagcaagctcaaaacttaataaaaaaagcagaggataagtggattaatataagaaaaattcttacttatttaggtataaataatacagacataatgaaacctcaacaggatttaatagaaaaatggcttcttatttataagtattcaaacgaaattatatttaaagcttgtgacgtatgctttgagagattgaatagagcagatttcaagtatatcgacggaatcttaagtaattggaataaaaataatattagaactttagaagatatagctcttaaagataataaaaattcaaaaaataataagtatcaaaaaacttataatactaataataatgataaatcatctctcaaatttaataactttgaggctagagagtatgactatgattcattagaaaaaaaacttttaggatgggatagcgatgattaagggttatcaaacagaaattttaaaaatatatgataaacttagagaagatgaagctagaaatttgaaacttaggaaagaagaaatattaaagaaatatcctgagatcattgaattggataataaaattcaacgattatctttaaaaatggcagtatcaattcttaaatctaaagatagtgaaaaaacaatagatgattataaggaaaatataacagatttaagaataaaaaaatgtgaaatgttagttgaaagaggttatgatcctgaatatttgaatttgcgatatcaatgcaataaatgtaaagatacaggctttataggcaatataaaatgtacttgctataaacaaaagctcattaagttatactataaaaattcagaattagaaaatacaacatcctataataactttgataattttgatttaaatttgttttcaagtcataaacttggagatgaaaaatattctcccagaaaaaacatggagaataatttagaatatatactaaaagactatcttcctagtttttcagaaatatcaacaaacttattattttacggaaatccaggtagtggtaaaacatatttatcatattgtattgctaaatctgtattagatatgggattcttagtaatttataaaacctctgatgagttaattaaaaatttaagagaaataagattcaataatgactcaggcttagagtcattattactagaatgcgacttactaattgtagatgatttaggcgcagaacaccttaatgaattttcagtaactgaattatttaatataattaacaagcgaattcttgctaataagaaaatgcttatctcaaccaatttaactttgccaggaataacaaagcagtatagcgagcgaatcgcttctagactaattggagaatttaagctctgcaaattttattctgaagatataaggattaagaaaaatttagaaaaaaatagataatttaaataaactaaactctaatatgatatttattctcttaatgactatcatattagagttttcatttttactacaaattgatattataaatcatatttatttgaaaaatctgtttcgcaaactatgttattctgtgttaacatcttatttatatttaaattccctttaataacttgtgcttataataccttcaaaatttatccacagatctgacttgattataattttttaaacaataaaaaaagaacaagttctagtctataagaacttgttctttgatggcgactcagaaggggctcgaaccctcgacctccggcgtgacaggccggcactctaaccaactgagctactgagccatcttatggtgggcacaacagggctcgaacctgtgaccccctgcttgtaaggcaggtgctctcccagctgagctatgcgcccataagatagatataaatggtgactcctaggggaatcgaacccctgttaccaccgtgaaagggtggtgtcttaaccgcttgaccaaggagccatattaagttttgttatgtttatttaaaatggagctggcaataggaatcgaacctacaacctgctgattacaagtcagctgctctaccgttgagccatgccagcatattttaaatggcgactcagaaggggctcgaaccctcgacctccggcgtgacaggccggcactctaaccaactgagctactgagccatcttatggtgggcacaacagggctcgaacctgtgaccccctgcttgtaaggcaggtgctctcccagctgagctatgcgcccataagatagataaaatggtgactcctaggggaatcgaacccctgttaccaccgtgaaagggtggtgtcttaaccgcttgaccaaggagccatattaggttttgttatgtttatttaaaatggagctggcaataggaatcgaacctacaacctgctgattacaagtcagctgctctaccgttgagccatgccagcatattttaaatggcgactcagaaggggctcgaaccctcgacctccggcgtgacaggccggcactctaaccaactgagctactgagccatcttatggtgggcacaacagggctcgaacctgtgaccccctgcttgtaaggcaggtgctctcccagctgagctatgcgcccataagatagatataaatggtgactcctaggggaatcgaacccctgttaccaccgtgaaagggtggtgtcttaaccgcttgaccaaggagccatgctatattgtctttcgcttaaatgtcttaactagatgtccttgagttattcaagctgctgaccacatagactataatacccaaaattagattccctgtcaacacattttttcattttttttatttttatattatttatttttaataaagtggcattatatctacatttcagaggttccttaaatataatctctagcctccttcagactagataaaagatctttttttaaattaatttgctcttcaatattttttatttcaccacaacatatttctaaaaaatcttctttctctattttattaatatttatactatatccattctttttaaaattttttcctgacgctttaacttctaaaggaaatttattatttataaataacagcatttccttttcccatactttacttttgtacagtttatatttatctcttaaaatacttagattttttacctcttctttaatttctaactttaatgattcatatagtgcattgtaaaaaagtactgatatccctctttttaatttaattttcaagaaatttctattgttaattaaaaatttatctatatcactttcacttatacattccacatcattaaaagaaaaactctttaccccactcatattcggataattaaccattatattatcaaagttcattctgatcactttaaatactctttcgaaatctcccgaattcatattaattacctttacttccattataaaatcacctcatttttagtattcctttcttttaaccttaatattactatgataaaatttattaaaaagtattataaaatattgaataatatgatttgaatccttttattttagtagtgattaataaattaatggtatacttaaaatattcagtttattttagcactgggtaaaatatgtgatttaattttatatggtcaataaaacatacatagggagtgattgttataatgatttatcacgatttaatgattgtcggcggtggtgcctctggcctaatggctgcaataatagccaaagattttggacttgatgtggcaattattgagagcaacgatagaattggtaaaaaaattcttgtaactggcaatggaagatgtaatattactaataaaaatatatctcacccatttgggtgtttccatagtgaaaatcaagatttctttaaagcgacattagataactttactgttaaagatactgaaagcacatttttatctctaggattgccattaattgaattggaaagcggaaagatgtatccaaaatctcttcaggcctcttctgtaatagatatattcagaatggcaatagaggatagacaaatacctctatatacaaattgtaaaattgattctacaagtaaaaaaaataactttattttaacaagtaataatgatgactttaaaaatttttcttgtaaaaaacttattttaagctgtggtgggaaatcagctactaaaacaggttctgatggatctggctataaactatgcaagtcattgggtcatagtattatagagcctattcctggcattgttcaattaaaattagattatccttatttaaaagctctatcaggagtaaaatttgatggctctgcttctattttagttgataataaagttattcgaacagagtttggtgaaatactttttaccgattatggaatttcaggcccccctataatgcaattatcatcttatgcttctaaagctctctatgaaaatctaaatgtaactataagaatagatatgtttccactagaaagtaaagatgatattgaaagtttctttaccacacatttttctatgtttggtcacagagagatatcaacagccctaattggggttataaataaaaaattaatttctacaattttaaaagatgttgggataaaagatatacatataccgtgcagtagtattgattggagaactaccagcaaattaattgataagtttaaaagatgggattttaaatgtattggcactaatggctttaacaattcacaagttacagttggtggtgtaaatacatctgaagtaaataatatttccttagaatctaagttagttaaaaatctttatttctgtggagagattttagatgtgcatggagattgtggaggtttcaaccttcagtgggcatggagttctggatatttagcagctaaatccgccgccaatagctaaaaattattaacttatctataaaaataatactataaaattagctgtcgtaattattaatattacctagattcttgcaacagctaattttctatatttacctttattattttttccaatctgcttgtaatagcgttagttcagttccctcaccattttttatagtatgatatgattttaaactattttcatcaattacatttatagcagcagttgatgaaatcttatccccatatgttgtttctttctcaaatactaccttaattcttttaagagtataattattaattatatcgagaggaacagcttccattgcccactcaacatatttgacattattaacatggttattagaatcaatatcactgtatcttatgttaaattgcttatagtattgtgcatcatttgttctttctattttatccatgcttatatcgtaatcaacatcaccatctactccatatatatgatattgttcatcttgtattcgcattggccttcttttatctatattaattagaaaaaataatgctagtgcttcccctataacattattattctcatcattaattgtatattttcttaatccatagaatttcttaaagcctatagcttctgttgtgacgcttattacctcaccaaacattggatatctatacatttttatatcgtatttataaaatacccaagcgcagttatttttcgtacagtaatcaattcctccacctaaggcttctgattgttgagtgcctacatcacatataaaatctattatagatgacaatttacatcttaaattagaatttacttcataataatgtatttcatatttttttgtaaacttcttactcataattaacaattgtaaaatgcaaaaataaatctcaagctaaatttgaaacatttttatttaacgaataaattatagctaaatggcatctattttgatttacaactcctcccctcctttactatatcttatatttattattataaaaaattatcaataatattgttaatgaattatttaatcttataatctattataatcacaaaaattgaattacacataaaaaacataaacgatataaatatattttttaataagtaaaaaaggattccctaaaaagaaaatccttttaaaataattatcttatctatttaatgcttctaataaatcgtctagatttaatccatgtactgttgcagcttctgctatagtttcagcttgagctgatggacatccaacacatcccattccaaaactcattaaaacttgagctttagattgatctgcactaactacttcaccaattgtcatatctttagttatcatactttcaccttctttaatataactttatgtaattattgtctacaataaaattatattttatacaaaacataaagtcaatacccgagcataatactaaactatagattatctattctcatagtttgatctctctttggtccaactccaactatagaaattctagtccctgtgaattctgatattcttgctaaatacttcttaacattctcaggtaattcatcataacttctaacatcagctacactatcatcccagccatcaaattcttcataaattggttcacactctgctaaatcttctaaacttgctgggaagtaatctataactgtatcattaaatttatatccaacacatactttgattttttctagaccagctaaagtatcaatcttagtaacagctaatgatgtcaatccactcactctaactgcagttttaattataactaaatcaagccatccacatcttcttgatcttcctgtatttacaccatattcgtgtcccttttctctaatccagtctccagtttcaccaagtaattctgttgggaatggtcctttaccgactcttgtagtatatgcttttgttatacctactgcattagtaatcatattaggtcctataccagaaccacttgaaacgcctcctgcagttgtgttagatgatgttacatacggatatgtaccataatcaatatctaatagcattccttgagcgccttcaaataaaactgtcttatctgctttaattgcatcatataccttaactgatgtatcttgaacaaatggtcttaatttcttagcaaaacctaagtattcatctagtatctcatcaaaatttaatgcttctccacctaatactttagtaatataagcatttttcatttcaacattttctcttaatttttctataaaaacatcttcatgcagtaaatcacaaactctgattccacatctttcaaatttatctgtataacaaggtccgattcctctacctgtagtacctatatcattttttcctctagctttttcttttaatttatctagtaccttatggtatggcattataagctgtgctctatcgcttactattaacttttcaggcgatattttaactccaacaccttctaagtattctatttcttcaaataaagcctttggatctacaactactccattacctataacatttaatttatcttcgtataaaattccagatggtattaatcgcaatttgtattctttatcaccaaccactactgtgtgaccagcattatttccaccttgaaatctaacaactacattagcttcctctgctaagtaatctgtcatctttccttttccttcatctccccattgagctcctaaaacaataaatgctgacatttatattgcctcccttaatatataaagtttaaataaataactttaatttttattatcaatttggagtttcattaaatttattttaacctctccttttaaatagtagcaaagtacttttctatggtcaaccacatatcgaatatttttttgctttttttataaataattcgtataattgttttatattgttatgatcaagatcatgtttttgtaaatttgaatatatttagcatattaaggagtgtttttaatgaatatttatgaagaagccttgaaatttcatgaagaaaaaaaaggtaaatatgaaatcaaacctacctgtgaagttaagactgctaaggatctaagtcttgcatatacacctggtgttgcagaaccttgtcgtgagatacataaagacccatccaaagcttatatatatactcgtaaatggaatacagttgctgttatttctgatggaactgcggttctaggacttggagacattggtccacttgcttctttacctgtcatggagggtaagagtattttatttaaggaatttggtaatgtagatgcatttcctatagttttagatactaaagatatagatgaaattgttaatacagttgtaaatatcgcgccaactcttggaggaataaatctagaagatatttcagctcctagatgcttcgaagttgaaaaaagactgaaagagaaattaagtattccagtatttcatgatgatcaacacggaacggctatagttgttttatcaggtctgttaaatgccttaaaaatagtaaataaaaaactagaaagcctaaaagtaattataaatggtgctgggtctgcaggaactgccatatgtaagttactactttcttctggagttaaaaatatagtaatgtgtgatatagatggcgtaataagtagagataaagatttaagtcataatatttacatgcaagaactagctaatataactaatccaaataatgaaactggtgcgcttaaagatgttataaaaggtgcagatgtttttattggtgtttctgccccaaatatagtttctaaagacatggttagaactatgaacaaagatggaataatatttgcaatggctaatccaacccctgaaatttttcctgaagatgcaaaagaagctggaattgcagtaatgggaactggtcgttcagattatcctaaccaaataaacaatgtattagcctttccaggaatatttagaggcgctttagatgtaagggctacagaaattaatgaagatatgaaagtagctgctgcttatgctatagcaaatgctataccggctggtgaactatctcctgataatataataccaaaagcatttgatctaaaagttcaagctttagttgctgaagctgttaaagaagcggcaattagaagcggcgttgctagtatttagtattcatgaatttaagtttttgatttcctatttcaaattaagacctacaattgaatgataaactcaattgtaggttttattatttgtattgcttttctattaagattctaccagataatataatactgaaaataaatattttatccacaacttcacttaagcaataattattcacagaataagttttatataattatccacattatattattatcaatcttatccacaagaagtatcttcaagaattatgttaataaatatattattctcttaaaaccaacttaactataaccaatactataggcaaccataaactatttaattaatattaattacattgggagtgaatcacatgaataaattactaatacctataaatgatgatacctttaaagctaaagttaatataagatttaataatatacttgatggcttatattctttcaaaaattttactcttgtagctagtgatattgatgatggtgagaataaactaatcaaattaatagaatatatttttgagatgaataattctaacgcttatatagatttttatataaacaaaatttcatctgaagacagaaacaagctttttgatctcctttcagatgaagataaagatatattcacctcctatttaaattttgatgaacacactggtgtattttttagacttgttaataaagaacttataccattcctagttcgtttaaatacaagagaaattttcttcgtcactttttattttactaacaaacctataacaatttggggaaattatgatttaaactttccttgtttttttaatgctcaagaagattttgaattttactataatatatctaaatcatttggcctcttaattaattctgattcggaagattaaaattataaaaaaaggtatattaaataattataattatttaatatacctccacttttcaattactacatacttttagatttctctgcacatttatccatagcctgtataacactatttctaaaacctaatttctctagttcaactactgcatctatagtagtcccagcaggtgaacaaaccatatcctttagctctcctggatgttttcctgtttctaagaccatctttgatgatcctaagacactctgtgctgccattttataagctttagccctaggtattcctaatcttactgccgaatctgccattgcttcaatgaacataaacacatatgcaggtgatgatccacataatgcaataaatgcgtgaaaatctttttcttctagttgaacacattctccgaaaccttcaaatatcttaaagcaataatccagctcgtctttagttacattcttattagggcatactgctgacattgcttgccctacaagtgctggcgtatttggcattgtcctaattattttagcactactattaatccactcctccatattgctaattgtaattcctgcagctatagtaataattaatttatctgttgttaattcggatttaatttcacttatcatttcattaaacataaaaggtttaatagctaaaataataacatcagattctcttgcaacaattgtactatctaaagttgttttcacttggaaactttcttctaatcgctttaaagaagactcagtcttggttgatactattatatcatcagcctttataaatccagatttaataagacctccaaccatagaacttcccatattaccacaaccgatgaaaccaatttttttattcatatcatagcccccattaaaaaatttttgttatttattcaaattttatcattttatatgaatatcttaattataaaccaccactatcataggatagcttgtattaaaacttcacaaactataattaaatatgaagggaggaatatatatgaaagataattgtttagtatataataattgtttaataagcccaaaagaattcattaattccatgctatctcttgagctcgaagaacaacttcctacatgtgaacttgaagaatcttcagatttttattacataaatgtagattcattctatgatagtaaacatatattagaaatatcttataaaaatcattttttaatattaaagattatgtttaataataattcaaaagaatttttatttcagagaattttttatttatcaaaagttgatgtaagtaatattttactccatgataataaaagcagtttaaaattaataattccaaaagctgtttaataatattgataatcatattattcacatcatttaaagatataagaaattttatatttatataaatttcttatatctttttaatttagtattactaattatttaaattttattccttatgaattaaatctaaattgccgaatttactatactgaccaagccaagcgagtttaacagttccaaccggtccatttctctgcttagccattatacactcaccgatatttttatcttcagtttctttattgtaatattcatctctatataagaacataacaatatcggcatcttgctctatagatcctgattctcttaagtcagataacatcggcctatgatccgctctttgctcaggcgcacgtgacagctgagataaagctattactggacattccatttctttagctaatgctttaatcgatcttgaaatttcagatacttcttgttgtctattatcactacctgatcctccagacataagctgtaaataatctatgacaattagatctattccatactccattttaagtcttctgcattttgatctcatttccataacagttacgccagcagtatcatctatataaatttttgcctttgaaagtggacctgcagccatagctatattttcccaatccttatcttctaaagttccagttctaaggcttaacatatctacgtttgcttctgaacaaagaagtttatatgccaattgctctttagacatttccagagaaaagactacaacacttttattttctctaagagctgcgtgttctacaatatttagtgcaaatgttgttttacccattgaaggtctagctgctattaatatcatatctccactttgaaatccggatgtttttgcatctagatcagtaaagccagatcctacaccagtaattgttcccttattgttgaacaatttctctatttgtgcaaatcctctttctaatacatcgcttaaaggttcgaaatcctttgatgttcttttttcagctatattaaatattttcttttcagcactatccacgacatcttccacattactttgattattataactttcttctattattgcagttgatgacttaataagttttctcaacgtagatttatcagaaacaatttttatatatgcgcttaagtttgcagtagttggtacagaagagcttatttctgttatataggttacccctccagctctctcaagcatatcagaactcttcaaatattctaatagtgttaataaatctactgctatatcacttctaaacatttcttgtatagctttatatattaccttatgaccatctctataaaaatcctcttcttctaaactctctagaactttggcaatagcattcttatcgatgatcatagatcctataactgattgttccgcttctatgctttgaggcaaactcctcataactgatgcatccaagttttattcctcctatctaattatcaattgacaattaattttccctttatcttttgtatatcatcattctaattctatcatttcttagttgcaaaaaaaagtctccttcatattaaggagacctatttcattaaattaaataagggcaatgtccataatctcttttatagatcctacagttctaatatctatgtcatcagtatttagaggaatttcatttttattatcacttggaattaaaacagtttttattcccattcttctagctccatatattttttcaaatattcctccaactggtttgacatttcctttgagtgatatctctcctgtaatagccatatcttgccttataggtttgtttaacaacgaacttattatgcaaatggtgatagctgcacctgctgaaggtccatctatttttcctccaccaactatattaacatgaatatcataatctttaatgtctttatcggttaagcttcggattactgaagcagcattaaatacggaatccttagccatacttccagctgtatcattaaatcttactatacctgaaccctttttctttgcagcaaaaactgtagcttcaatttcaattgtagatcctaaaaaaccactaacgcctaatccatacacatgcccaacttcgcttttgtctacattgcttagtctttcatatggtgtatatcttccaactgatattacctcatctaaatctgataattttatttctaagttatcaacaaattttttagatcggtgtaacgcatatccatatgtgtctgtcagaatatttacagcttttctaccctcaaatgtataattacttatttttttagcaaccccatcttctaagtttacctttaatttcttagctgcatcttctactataaatacaacatcctttgaagaaagaggttcaaaatacacttctgtacatctagaccttaaagccggattaatttcacttggacttttagttgtagcgccaattaaaacaaagtctgctggagctccattatcaaaaagatattttatatatttaggtattgtttcatcatccggatcatagtatgatgatgaaaattctactcttttatcttctaaaaccttcaacagcttgttttgaagcatagagtccaattctccaatctcatctataaatagtatacctccatgcgcctgtgtaactaaacctggtttaggttctggtatcccaacctcagccagatcccttttacttccttgatatattggatcgtgcactgatcctagcaatgggtttgttatttctctaggatcccatcttaatgtagtaccatcaacttcaacgaatttagatttgtcatcaaaaggagtaaatgaaagttttttaacctcatctaaagctaatcttgctgctgtagtttttccaactcccggaggtccatataatattatatgttgtggatatggtgatgaaagctttgatattaatgatcttatagctctttcttgcccaactacttgattaaaatcagttggtcttaaaaagctcataatatttttactagtaattctactatctaattctattaaattattcaatttgctgatagtctttttattttcagaacccttttgcttgtttataactgaaagtctaacttcatctatatacttttcctgcttttccataatagattgttcaacttgagattcgattttattttgaacatatctttttgctagttcatttgaaattaacctaactgttctatttatggctttttgcaattcttcttccttaggtgtaacctttaaatcttttccctctgctaatatagtatttagtgcgaaaactttatcgcagagatttgatgattgaatgaatttatctagtttaaacctaactgttctagccctaaaagctcctttgtcaagtacattcttagttatagaaaataaagcctcgatttgtgattctaatgataaggttcctgaaataatatcctgcaataagcttgcgtcatcatatgaattcaaaattaatcctccttattcttgtggaacaataatcaccttcattttagtgctaacttctggatatagtttaatatcaatttcatatccacctgctaattttattgtatccataacaattttctttttatctatttcaatcttatactgttctctaattaattctgcaacatctttactagtaattgcaccaaataactttccattttctcctgtcttagctttaatttttatttcttttccttttaattcttcagctaatttttgtgctgcttcaagttctgctaacttttgttttcgctcattttcttttttattattcaaaatgtgcatatttgcatcactagcttcttgtgctaatttccttggaaataaaaagtttcttgcatacccatctgaagcctcaatgatatcaccctttttacctatctttttaacatcttgtaataaaataactttcataacttattcacctatccttaagtattttttcattacttcttttaattcaacaattacttcctcaattgtcttatttgatatttttacgccagcaatattcatatgtcctcctccgccaagtgcttctagcactacttgaacattaatatcgcctactgaccttccacttatatatatatcgttatttacttcccctaaaacaaagcttacagatattccggatatatttagcaattcatctgctgcctttgctataattactgtatcaatatttttaggggttatagcaatagctgtattatctcttacttcagcagattttatagtctcagcaataagtaaataatcttctaggtcatcagtaaacatctttttaatttctataggatctgctcccaaggattttaaaaatgatgcagcatcaaaagttctgacaccagttttaaaagaaaacccttttgtatccataaaaatacctgcaagcaaaccttctgcttctgttcttgttaatttaggcttatcaaccatatactgaataatttctgttaccatctctgatgtagatgaggcatatacttctatataattaagtatatcatgctctatcatatcaggacttcttctatggtgatctattattacttttctttgaaccttatctactagcgataaatcagcaacataactcttattatgaacatccacaataattactagtgtttgggcatctaaatcactttttgcctcttctactgatataaataaatcatcatatttagattccttgtttaatttatttaagaaatatccaattgcagtaatgtcattatttaatataattttacacccgatccccaattgcttaaccacgctagccaatccgactgcagatccaaagcaatccatatcaggattcttgtgtcctattatataaaccttactactctctctaattagttcactcaaagctctagctataactcttgcttttactttagttcttttttctatttcttttgaatttccaccaaaaaactttatgtcatcattagttttaacaacaacttgatctccacctctgcctaacgctaactctttagctatattagcattgttatgattttcaagtggagacattccacctctgccaacaccaatagataaagtaatttcaattgaattccccttatctatttttgatattacttccattatattgaacttgtgttttatttcatcttcaatatacttatcttgaattgataatacatatttattggtatcatatcttttaatcattgcttttaagttattggcatatgtgtttattgttctctctatttcagctactaaaagcggtctgttgttatcatcggttttatctattacttctgtaaaattatctacttctattaacattacactctcttgagtggtttcataatctattagcttcgtaatgtcattaaaagataataagtatagattttttttatttttagtttcaattaaagtagcgtatacatcatataatttattttgtatgctaaatctttgatgcaaattattttcattctttaaaaaatcatctagatttatacctctggctatacttaaaatattcttttcagtattttcttcatctgattttaaagtgttaaataaattattataccaaactatttctccatcttcttttatcaatactaatggatatattgactttaatgcattctctgatatacctttatttatactttttataaattggttaaaatcactttccttttccaagtaataatttaattggtggaaattatctataaaatagattactaggataattatacctatgcctgtataattatatgcaaataatagtattaaaattgtaattagtaatccaggcttaagcaaacgtttaagcatagttatccaattcataaaaagcctcctaagaatatttaatctcttctgttactaatataatgcttcaacttacttaagcttttaccttctttttcaacttgatcctctgctcttacccctaaatctaattttgattttatattatggtctatatctaccaatgaatatcctaacttatcacctagaatatatagtataattatagctcctgaaatacaatctaaaatagaatcacgggctacattgttaccttttgtcaatagtctgaaaaactctcctattatacaaagaagttgtgcttttaaatcttctataatcttaatgttagtcataatattaaaattatcttttctcatagtctatcacctctctcaaaacccttgtattattattttaatttttttttgtgagtattgcaagaatttatagacaatttgctatatttttccacaaagttgagagattgatttaataataatatttttttatattaaaaaccccctgatttctcaggggggatattactactaccattattctgttgtaaatggtaataatgctatgtttcttgctctcttaattgaagatgttaattctctttggtgcttagcacaagttccagaaattcttcttggaagaatctttcctctttctgtaacatattttctaagcttatttatatctttatagtcgataaattcagctttatctacacaaaaagcacaaactttttttctagatcttctcattttaccgccaggtcttctaccgttgttaccttcttctctgctcattatattccctccttacttaaaattttagaaaggcatatctccgtcatctaccggagttatatcctcttcaaatccaccactgaatgcatcattcgctggtgctgaatattcattgctattaccaaaactatttcctgatgaattgcttcctttacttcctaggaattcaactccaccaaattgatctgctacaacttccgtaacatatctcttagttccgtctttcgcatcataacttctggtttggattctaccactaatagccacttggctacctttactcatgtaattagcagtactctcagcttgtttgccccatactactacaggaacaaaatctgcttctctttggccagtttttgtattatatttatcaactgctaatgttaaggttgttactgctgctccacttcctggagtaaatcttagttctggatcttttgttaatcttccgattagaactactttattcatttacaacgccaccttatacttgttcattaacaatgatatgtcttataacaccatcagtgattctgaatattctatctaactctcttggtaattcagggttagcagtaaagttaactaaagtataaaaaccttcactaacttttgagatttcataagcaagctttctcttaccccagaaatcaacattttctactgttcctccaccattttctataacacccttaaacttttcgatgttagcttttacagtttcttcatcgaatgatgggtttaatataaatatagtttcgtactttctcattaatttcacctcctcccctcggactaacggctatgctttgcatagcagggattacaattaatgattataccattaataaaagaatgaatcaagttattttgctaactttctgcagcaattactattttttttgcttcctttttaaatttcactctaggaatcattacaattctaccacagccagtacattttatttttatatctgcacctacccttattatttcaaattgatttgaaccgcatggatgttgcttcttcatttcaaccacatctccaagattaaagttttctaccattactccccatccttctctatattttcattatctagttgtttctcatccaatgatacatttattctatttttatctaaagctaactttattgacattctaagctctctttccattttccactgcattaatggctttgcattccctactactcttattgtaacctttgatacttcaagagctatgaccccagttatttctatagattcacctatatattcttcgtttttgctcttaaaatcgtcacaagcagctcttataacgttaataacttttttaatatcttcctgtggagatatatctatgtctaccgtgaacctaatatcattcctcgaatgatttgtaactccacctattgacccatttggaattgaatgtatatcccctgtaaaatctttaatcacggtggctctaattcctatacttttgacaattccgttaaaacttcctattgttacatgatctcctactccaaattgattttcaaataaaataaaaaatccattaattaaatcttttattagactttgcgcaccaagaccaactgcaattccacctatactcgcaaacgtaaatgacataccaccaaatacaattgatattattattgttatccccataaaatatactgaatattttaaaacacttttcaatacttcccccaaagtttttgccctttgagaatccaaagaaatcactgcattgctttcaatctgcttatcaacaaacttttttattaaatgcttacctatttttatagaaaaatacattataataattacaactgctattttaagtgctttatttattattagctcgattgatttaacacttatgatatctactagcgtactattaatattagatttcaattcttttaaaaattggaaatcttcctctaactctattaagtaattaccatacaaacataatcccccttcctatttattaattagtatatatccttcatcatttctatagtatatatttttatattccatcaaatcattatttattatgttatctatatctgcctttttatctattctcacgcatatcccacaactcatagttatagatgtaggagttggcattattctaaactctagatctaattcttttaattttttttctgctgacattgcatcatatgtatttttgaatactattatataataatccatatttacaccacctatataatctttattataacttatattaatattatatatatttttttaaatttataaaggttaagaacacattcatataaaaacttcataaatttagtgaaaaatatatctttttattttataattatatagaaatgcaattagaaggagaatataatgttttcagtaattaacatattaaaagctatattaattggtttttttacaggttttgttgcctctatacctttggggccctcaggccttgaatctgttagtcgttcaatatcaaaaggttttaaagagggatttaaagtatcacttggtgctgtatccgcagatataacatatatagtaattataaacctaggtctttttacaatacttactagaaatcctaagtttcacagtctattttggatagtatctggtattgttttaattatatctaataaaatatcatttacagctaaaaagccagaccttaacttagaaaaatcaatttatagacgttcatcaaatgcttttttaactggttttttgataacgtttctcaatccaacaactccatcattatggattgcattaagtggaaccatattcaatgtttggagacatcatggaaggatatattttatattctcaatctcatcaatgataattggaagtataacttggttttgctttcttaatattttagtaagtaaaggttttaagaaattcaaacctgatttggccaataatacaactaaaatattggactacttcctatttgctttgggtataatatttattatttggggctcttacaaattatttttttagaggtgaatacttgatatggaagtttacttagataattcatcaacaacttttcctaaaccaaagcaagttattaatgccatgtgtgactatatgctaaatgtaggtggcaatgcaggccgtggaaattacagtaattctcttcaaagtaatagatacctttatgatgcaagagaattaatttgcaatttttttggttatgattcccctagtaatgttatttttacaaacaacgttactacatctttaaacatattaatcaaaggtattttaaggcatggtgatcatgtaataacatcttcaatggaacataattctgttattagaccattattctcttgtaaggagaatcttcaaattgaattagatatagtagctgcaaattctgaaggttttatcaatgccaatgatttaaagaagaaaattactaataaaacaaggctagttgtaataactcaagcatctaacgtcacaggctcagtacaagacctatataacatcggtaaaatatgtgatgaaaacaatatttttttcattgttgattcttctcagggtgccggtgttctggatatcaatatgaaaaacataaaagctaatgcgatagcttttactggacataaaagtttattgggtccgcaaggaattggtggatttatattggactctaaatttaatgactcttgttcaagtctaatacatggcggtactggaagtctttcttattctttatcacaaccagactttctacctgataagtttgaatgcggaactcataatcttccagggatagttggattatcagaatctattaaatacataaactcagtaggtttaaattcaatttatgaacataataactacttaataaaacatatgctcgaaggtttgctaaacatcaaaggaataactgtttatggtgatttatctggcaaaaggctaagttcatgtatttctataaatcttaattccctcgatccttctgaattgggatattatttagaatgtgaaggaataaagactagatctggtttgcattgttctccattagcacacaagaccataggtagttatccatccggaactgtcagactaagcattagttattttacaactaaggaagaagttaattatgtgcttacggttctaaataaaatttcaaaaaatctataacaacaaatatttcaagtgctcttagcaccggccttaatacataccttttatattattttcttgttagatgtgattattaatttaatttgtattctatttattatttttagacaatgaataaaacctctttttattggaaataaatctaataaaaggaggttttcttatgtatcaaagtttttctgtaaactcatcttcactggcttcttgtactaaaatcaaagattatttattgactgaattacaaccaatactttatgaagatagaccaattatatttatttgtattggaagtgatagatctactggagattcattaggcccattagtaggacataaattaaaacatttttctaagaataatatacatatatttggaacactcgaaaatccaatacatgcaaaaaatatagtaagtaaattaaatgagataaattttaattttataaatccatatattatagcaatcgattcttgtttaggatctataaataatataggtaaagttttcatacagaaaaagcctctacttcctggtttggctttaaataagaaccttcctgccgttggtgatatgagtataactggtattgtaaatgtatccggaggatttgattttttagttttacaaaatactagattatatactgttatgaatctcgcagattcaatttctagaggtatctattattttattttaaagagcttagataggcctagcactactagcacttctgtaaatattcaattttagtaacttttaattcttaattgttttaacaaaacaattctcatttctatgattattaatttattttaaacttatatagttgtcatcaggtaatactattttgtattattttttaataaagattgtttcacgtgaaacaatctttattttctttgctaattttcttttaacaataaaaactttctagccatgcgtggtatattataatttaatagttttctggtttctaacataactataatcacttacttataactatactagtgtaaaaatgcttgaataattctacaactaaataaagtaaaaaaacacctatgacaaatccttgttataattgagttaccacacaataatgccaacaaggagccatacataaatgcttcaaaacacaattgtatcggatgaactatcaatatacaattttttaaaagaactaaattttaattttcacttaactacgcgtcaattaaggaatttagaaaatataatgaatgctatgatatcagaaggttataatgtttaaaatttccgacatagcagagcttgctccttcgaaacatagaactagtattactagatttctttcaaataatagtttctttactaccgtgtaacggattagttctgccatactcaattgatatctatgataaagattatattataaagatagaattaactcaaaaattaattacaacacttctcaaacttgaaaataaagcctatatattagctgttcgttagacgattgaaccattttttagagattgcaaaacttacttagggctagatggaaatcaagtgaaaagtaaaaaaagtattaatagatatctaatcataatgttagtaaattatacttattgcgaaatatactgtattgattttcttcacattaatactgaatataagttgctaataagaatttagaaaagtctaaaataatatatttacaaagctacttcaagcgggtaggtctatagaaaaagtttctagtcattagaaatagcttgtaatctgtttttttattcaactgtaaatttctttaaacaaaactgcaccattgtagataatatctatttttcaataaggaaatcaatcttgattatctatgtaaatgcgtcgatatattccttcaatgttcatttattcatacgctatatcttctctatattttatttttatatactcttttattatctttatgcttattcctattatatctacataatatccttacagaaaattgtccatttctatacttgcatttttgtgtgtccataaaaaatcatcaatgaattctacctttcagataccccctagatttcactacacttaatttaggttgtatacttacaaacatattatataatctagaaatgctttcacttctataatttcaagtatttttttcacataataatccaggtgttttcatatatcattctttatcttcttgtatataatttttttctaaaccttggcatgaaaactatataatatttaccattccgttcactatactctaaattatcaatgtccacaaaagatgcacctccttgtagttcatgattcaagtcggcgaacatgctataattttgcagcagagatttatttcttcacctacagtcaaaagctttccgtaaccacaagtccagcttgtgatattcttaaatacgaaaatagagcaccaaaatctattggtgcccacttaactaaaatcaattctactaattcttattttctttattagctgcttcatttaaaacatataactcttcctcggaaaggtcatatcttgatattcccttatcaattggttttgcataagttgtactttcttgccttccatatataccagttaaaataactccatcatttctatcatctagcatagctatcgaaaagctcaagtcactaccaacattctcgaatgccttatatctcataatcgctactttttgaacacaatccttcatcttaacttctaatctcttacattcttctagagccttatcagatctttctttagcatcttcaatactatctaatctttccagtaacatttcttccaaattattattagtagtccctttcattaattttctgtatctgctttctacttttccaactgctttaaataagaccactaccattataaataataatataattattattgccattccaattaataaatatggcattatatcattcattgcgctaattagcatatccaattttgtgtcattcctttcataattgtttcacgtgaaacattacatattaataatgtcgagtattctttgaagatcttcctctgaataatattcaatttctattttacccttgttcttcttgtttaaaatatttacctttgttccaaaatagttctgaagctgattcttaatttctttataataaggatttacttctcctatattttcattatttttttccttttcaatatcatcattaattctttttattaatctttctaattctctaacggataatttttcatcaattacctgctgagctatttcatactgtttctgcttatcatttattgaaagaagtactcttccatgtccttcagttatgatactctcaattatatattgttgaacacgttcatccagattcatcagtctcattgtattagcaatagcaacccttgattttcctattctcttacttaattcttcttgtgtgattttaaaatcatttagcaattttctatatgctaaagcctcttctattggatttaagtcttggcgttgaatattctctatcaatgatatttctaatatatctctatcacttaattccattattattgctgggacttcttttaagccaaccattttagccgctctccatctgcgctctccagcaactataatgtatctatcatcctttagctctcttaaaattaaaggttgaataacaccatgggttttgattgactctgctaattcagctatcttttctgagtcaaacaattttcttggttgatcttcatcacttttaattttatttataggaatgagcaaactattattttcttgtgcagtattatctgattcctccggtataagcgcgcctaatccttttcctaaggcgaatttctttgccattctatcacctactgtctctctaaaaactctttagttaattttacatacgcctcagcgcccttacatttttcgtcatacaacattatcggaagtccaaagcttggcgcctctgcaagcctcacatttctagatattgtagcttcatataccttattcttaaaatatttttttacttctttcaaaacttcattactaagatttgtcctataatcaaacattgtcattacgacgccttcgatttctagctttttattaagagatttttttactaattgtattgtgtttattaattgactaactccctccaatgcatagaattcgcattgtattggtattagcactgaatctgcacatgttaatgcatttattgttaatacccctaaagatggtggacaatctataaacacatagtcatattctgattcaatttcttttaatttattcttcattatattttccctatcacttctatttataagttccacctctgcgccagctagttccatcgttgacggtgatatatacaagttctgcactaagtcactccttactatagattccttcatagttgcatcagaaattaacacatcgtaaatggataagtctaaattacttttatccaatcctaatccactcgtagtatttccttgaggatctatgtctatagttaatactctataaccttccattgctaaatatgcacataagtttatattagtagttgttttcccaaccccacctttttgattaaaaatgcaaattactttcataagcacagccctaaaagagcgtcccccctttccatattaatattatatatacttttttattataataaaagaattatgttctaaaaaacaataactcttaataaaatatattctataataaaatatttttcattaattcttaattttctgtgtataaatatgattgacaatcctatatttataaatataagattaatatatacttgcaataataaatttacatttagaattccagttatgtaatccctaagttaagaccaaaatgtagaaattcaattacaacatgtatatataattaaagttaaggtaatacttggtaaaaccttaacttccaattattccccttatttttttgtttttggtatctttactactacttctataaattcatcatcatctttatatgcatattcagctggaatatcaaatttctgcaaaacttgttttattgtattaacataaagtttagccggcaatacacctcttatatttcttttattcttattttttaattcttctccagccaatttaagcaattctttgttaattaattcttctgttttcttaacatttaatccgtcttttattactttttgaacaattcttaattgcatttcttcagtcggaattgttaacaatgctcttgcatgtctttcagttaatttattctttaagcataattccctgacttcactacttaactttagcaatcttaatttattagcgattgttgattgcttctttcccatcttttttgctaattcatcttgtgtaaaattatgatcacttattaaattataataagcttctgcttcttctatgtaatttaaatcttctctttgaagattttcaagtagagctatctgagcagattcagagtcagttatatctataatattgcaaggaaccgtctctaactcagctaacttagctgctctaagtcttctctctcctgctaccaattcaaagacctctccacgccttcttacagtaattggttgaattattccatgttctctaattgattgtgataactcttctatagcttcttcattaaaatatttacgtggttgataaatatttggaatgactttatttatgctaatacttactatttcattattcatgttcccaacccatcccttattaaaatactacatacatattttaccttattatccttatttgtctatttaactcctaccttaatattttatcatatacctgcttacataatcaaatttcaattatttatgtaatatctctatttaattggatttttacttattaatcctgcccttcttggatatcccttaggagatctatctatctttttcacgacaactaagttatgttttaattctgtatcttcaatgttaatttcacaaacttctaatatttttccacctaaaatctttattgcatttgtgctctctataatttcttgatcaactgatggaccttttagcgcaataaaacttcctccaacttttacatatggtaagcataattcagataatacactcatatttgcaacagccctagatgttgcaatatcaaaattctctcttagcttaatatcttttgctccatcttcagccctagaatgtatagttgttacattagatgctccaattctattaataactgtgtttaaaaaactcactcttttgttcaatgaatctaatagtgtaacattcaaatcagctctcattattgcaataggcaaacctggaaaaccagctcctgtaccaacatctattaaactgctagcaattttgaattcatctcttttaaatgcttttattgaatcaataaaatgctttttgattatttcttcatcatcaattatagctgttaaattaatcttttcattccattcttgaagaagtttcatataatcaataaatttttcatactgctctttcgatagttgtaaaccaacatcttctgctgatttagacattaaatcataaaacttcataattcctccaataataattaaaattatttattataataatgttcaagataaataagtaatactgaaatgtccgctggagacactcctgaaatacgtgttgcctgacctatgcttattggcctaatatcacttaacttttgtattgcttcagttcttaaccccttaatatcactataattaatatcctttggtaataatttcttctcaaatttcttaaattgagcaacttgttcaagctgactttgtatatatccttcatattttgttaatatattaatttgctctccaacgtcatgaggtaattctggtctctccgaatctatttgttttaaatcaaagtaatctaattcaggtctttgtagcagttcataaaaagtaattggctttcttaattcagctgaatttaatgatattaaaaattcatttatttcttttttattagttacctttaaattctttaatcgttctagttcattttcaatattttgtttcctctttataaatttatcatatctttcctctgtaactaatccaactctatatcctaaattagttaacctaaaatctgcattatcctgccttaataataatctatattctgctcttgaagtcatcatcctataaggttcattagtcccttttgtaactagatcatctattagaactcctatataagcatcagatctagttagtattagtggttctttttctttaatttttaatgctgcatttatacctgcaattaacccctgtgctccagcctcttcatatcctgaacttccattaagctgacctgcaccatataatccttcaatatctttaaattctaatgttggttttaattgagtaggatcaattgaatcatactcaattgcatatgcagttctcatcatttcaacattttcaagtcctggtaaggttttaagcattttaatttgcacttcttctggtaatgatgatgaaaatccacctacatacatttctagtgtgtcaagcccctcaggttcaataaatatttgatgttgtggtttatctggaaatctcattattttatcttctattgatggacaatatctaggaccaacgccttttatactcccattataaattggagatcttcctatattatctctaattattttacgtgtttcatcatttgtataggttaaataacaagatacttgttccctttcaatattttcactcataaatgaaaaaggtattatattatcatcaccattttgttctatcatcttagaaaaatccacagatcttctatttatcctagctggggttccagttttgaatctcctcaaagaaactcctaaatctaataatgattgtgataggtcattagctggaaataaaccattaggaccgccactatatgatacttcaccaattataatttttccttttaaatatgtaccagttgcaagaattaccgccttacatttaaaaatagctccatttttagtaactacgcctgtcacctttccattctcaacattaagttcagttacctcaatttgccttattttaagattttcctgttcctctaaaattctcttcattctaaattgataactttttttatctgcttgagctctcaatgagtgaactgctggtccttttgaagtattcaacattcttgactgaataaatgtattatcaatattgattcccatttctccaccaagtgcatcaatttccctaactaaatgaccttttgcagtaccaccgatattaggattacaaggcatcaatgctattgaatctaaatttattgtacatactaatgtattaaggcctaatcttgctgatgccaatgcagcttcacatcccgcatgacctgcaccaacaacaactatatcgaattgaccaccatcataatttactgccattacttttacctactttcctacacaaaattcactaaaaattttgtttaataaatcttcttctaattcatctccagttatttctcctaaagctttcatagccgctgttatataaattgatattaaatcaagatattcattagcattaattttatctaaagccattttacaattttctaatgatttatataaagcttgcttatgtcgtgcattagaaattattaagctttcagagcttatctctccattaaagaataactttttaacttcatcttttaaaatatctattccttggccagttttagctgatatatttattatattacttaaattcttaagtatttcttcttgaatttttatatctttcaaatccatcttatttaataatactatatattttctattctttattttattaattattctactgtcttcttcatctatatatctagatgcatcaagcatgagtattattagatctgcttcttcaattttctcttttgatttttccacacctattttttctactacatcttctgtatctcttattcctgctgtatcggttattttaaccggtattccatcaagatttatatattcctcaattatatctctagttgtccctgggacatctgttactatagctctattttctcttaataatgcattaagtaatgaagattttcctacatttggttttcctacaataactatattgagtccatctctcacaattttacccgcatccgcattagacaataaggtttcaatttttgaatttgtattctcgatcccatctttaatctgtaaaattaaattgtcatcaacgatatcctcatcatcctctgtaaaatcaactgcatattcaattagcgctaaaacgtttagcaaataccctcttaattcatttatttctttagataaagcccctttgctttgaatcatagcggctttcatcgataactctgttttagcagttattatatccataactgcttcggcctgactcaaatctattcttccatttaaaaatgctcttttagtaaattctccaggttctgcaagtcttgcaccagctttgataacctgatctaatacactattagtagatataactcctccatgacaatttatttctaccacgttttcacccgtatagcttcttggcgctttcatataacttaaaataacttcatcaattatctcttttttgttctctaaatccacaatattaccatacttcatagtgtatgttttcatgctttcaatatcgtatttattcctaggagtaaatatcttactagcaatctttaaaacattctcccctgaaattcttattattgaaactccgccttctccgattggtgtagcgatcgcacaaatagtatcaaattctttcatttaatttcctcctctttttaaagaagaatattttctaaactaaaactcctttttaactattatcaattttacataacaaaatttaaatagtcaaagttatattagctaaaacttctctttttaatcataaattttatttataaacttaaaaagaaagccattatggctttctttttaagtttaatctttctttaattcaacgactacccttctaaacggctcctcgccctcactatatgtattaacaaaggcatcttcctgaagtgcagaatgaatgattcttctctcgtatggattcattggctctagtttaaatgatttttttgttttcttaactctattagctgttttaattgcaacacctttaagagtttcctctcttttgcttctataatcttcggtatctagtataacctttttatgaggaagttcatgtaacttattaactacaagtgaaactaaatattgaatagaatctaatgtctctcctctataaccaattatcactcccattttttctccggataaattaattataatgctatcattctcttctttaatatcaatagttgcctcaacttccattcccttgagtatatgaactataaagtttcgtgcttcttcaatataattatattttctagaaactctaattcttgctggtttaactcctataacattaaataaaccctttgagccatgatccaaaatttcaatatcaaccatatccttatttgcatcaagttcacttaaagctttatttaaggcttcttcaacagtctttccttccacttctactgatttcatctgttaattcaccacctctaatatcaaagcaaaatcactttttgattatttcttttttctctttttactagctgaatttttagattcttccactgccataacaaatttatctgattctgttacagcatctttttgagtcttatcatccatctctctcattgctggcctatagtttaaaaaatatgtttgtattgtttgaattaaattaccaattatccagtaaagtacaagtattgatttaaaattcaatgacataacacccatcattccagccataactaaattcatacttcccatattcattccacctggttgtgatggtgttgatttagacattaaataagatggtatatatgttgacaatgcagctaatactggtaatatataatatttatctggtgcaaataaatcgtgaatccataggaatgaagcaccttctattccttgtatccccataaatacccaatagagagccattagtataggtagaggtaataatgatggaaggcatccaccagctacactaacattattctccttatatagcctcatagtttcagtattcaatttttgaggatcgtctttgtacttagcctgaagctttttcacttctggttgaattttctgcattccttgtgatgactttgctgccttaatgttaaatggtaatattaaaattcttataatcaatgtaaaaataaatattgccaaaacataagatagcccaacatccgatattcccatactaactataaagtcatgcagggaatcaaatatccctttcataaagttaactattgcttgaaacattaaaatatatacctcctaatatctcacctaaccggatcatatccacccttacaaaaaggattacatcttaatattctgtaaactgctaatgcactacctttaaaagctccatatttatttatggcatctattgcatattgtgaacaagtaggcacaaatctacagcatgaagatcttccaggtgaaatatattttctataaaatttaattaggcgtattagtaatttcttcattattatataagcctgcctttttaattaaacttctcatagctctttctacttcaaagtagcttttactttgaagaggatttcttgctataaaaacaaaatcatatccctttactatataattataatttaatctaaagctttcagttattaatcttttacatctacttctaacaacactattcccaacttttttacttacagaaatacctaccttgctataggctaaaaaatctctatccttattccttctattttttaatatgtacataactagaagctcatttgcaaatgatttacctcttttatatacaattgtaaattcaaaatttttctttaatctataaatcatagatatttttatactccttttttccctgcatttgcagaaaaaaggccactaatgggcccttaagctgttaatttttttcttcctttttgtcttctactcttaagaatgtttcttcctgattgagtgctcattctttttctaaaaccatgttctttttttctttgtctctttttaggttggtaagtcataaacattacatatgcacccccttaaatttattatttatagtaaaaactatacttcgctatttaaattttactttatcattatatagatatactatttttctgtcaaggtggtaataattgttgataaatatatttatatatatttttttgtggataacttattgaatatgagtatttacttatgttatcataaatattatgttgtgaataacttattaatataaa
